(19) United States
(12) Patent Application Publication
(10) Pub. No.: US 2022/0364071 A1
(43) Pub. Date: Nov. 17, 2022

(54) NOVEL CRISPR ENZYMES AND SYSTEMS

(71) Applicants: THE BROAD INSTITUTE, INC., Cambridge, MA (US); MASSACHUSETTS INSTITUTE OF TECHNOLOGY, Cambridge, MA (US); PRESIDENT AND FELLOWS OF HARVARD COLLEGE, Cambridge, MA (US)

(72) Inventors: Feng Zhang, Cambridge, MA (US); Ian Slaymaker, Cambridge, MA (US); Soumya Kannan, Cambridge, MA (US); Jonathan Gootenberg, Cambridge, MA (US); Omar Abudayyeh, Cambridge, MA (US)

(73) Assignees: THE BROAD INSTITUTE, INC., Cambridge, MA (US); MASSACHUSETTS INSTITUTE OF TECHNOLOGY, Cambridge, MA (US); PRESIDENT AND FELLOWS OF HARVARD COLLEGE, Cambridge, MA (US)

(21) Appl. No.: 17/264,340

(22) PCT Filed: Jul. 31, 2019
(86) PCT No.: PCT/US2019/044480

§ 371 Date: Jan. 29, 2021

Related U.S. Application Data
(60) Provisional application No. 62/712,809, filed on Jul. 31, 2018.
(60) Provisional application No. 62/751,421, filed on Oct. 26, 2018.
(60) Provisional application No. 62/775,865, filed on Dec. 5, 2018.
(60) Provisional application No. 62/822,639, filed on Mar. 22, 2019.
(60) Provisional application No. 62/873,031, filed on Jul. 11, 2019.

(51) Int. Cl. C12N 9/78; C12N 9/22; C12N 15/11; C12Q 1/6823; C12Q 1/6851

(52) U.S. Cl. CPC C12N 9/78; C12N 9/22; C12N 15/111; A61K 38/00; C12Q 1/6851; C12Y 305/04004; C12Q 1/6823

(57) ABSTRACT

The present disclosure provides for systems, methods, and compositions for targeting nucleic acids. In particular, the invention provides mutated Cas13 proteins and their use in modifying target sequences as well as mutated Cas13 nucleic acid sequences and vectors encoding mutated Cas13 proteins and vector systems or CRISPR-Cas13 systems.

### CROSS-REFERENCE TO RELATED APPLICATIONS

[0001] This application claims the benefit of U.S. Provisional Application No. 62/712,809, filed Jul. 31, 2018, U.S. Provisional Application No. 62/751,421, filed Oct. 26, 2018, U.S. Provisional Application No. 62/775,865, filed Dec. 5, 2018, U.S. Provisional Application No. 62/822,639, filed Mar. 22, 2019, and U.S. Provisional Application No. 62/873,031, filed Jul. 11, 2019. The entire contents of the above-identified applications are hereby fully incorporated herein by reference.

### STATEMENT REGARDING FEDERALLY SPONSORED RESEARCH

[0002] This invention was made with government support under Grant Nos. HG009761, MH110049 and HL141201 awarded by the National Institutes of Health. The government has certain rights in the invention.

### REFERENCE TO AN ELECTRONIC SEQUENCE LISTING

[0003] The contents of the electronic sequence listing (“BROD-2660WP_ST25.txt”; Size is 1,997,857 bytes and it was created on Jul. 25, 2019) is herein incorporated by reference in its entirety.

### TECHNICAL FIELD

[0004] The present invention generally relates to systems, methods and compositions used for the control of gene expression involving sequence targeting, such as perturbation of gene transcripts or nucleic acid editing, that may use vector systems related to Clustered Regularly Interspaced Short Palindromic Repeats (CRISPR) and components thereof.

### BACKGROUND

[0005] The CRISPR-CRISPR associated (Cas) systems of bacterial and archaeal adaptive immunity are some such systems that show extreme diversity of protein composition and genomic loci architecture. The CRISPR-Cas system loci have more than 50 gene families and there is no strictly universal genes indicating fast evolution and extreme diversity of loci architecture. So far, adopting a multi-pronged approach, there is comprehensive cas gene identification of about 395 profiles for 93 Cas proteins. Classification includes signature gene profiles plus signatures of locus architecture. A new classification of CRISPR-Cas systems is proposed in which these systems are broadly divided into two classes, Class 1 with multisubunit effector complexes and Class 2 with single-subunit effector modules exemplified by the Cas9 protein. Novel effector proteins associated with Class 2 CRISPR-Cas systems may be developed as powerful genome engineering tools and the prediction of putative novel effector proteins and their engineering and optimization is important. Novel Cas13b orthologues and uses thereof are desirable.

[0006] Following the demonstration that CRISPR-Cas9 could be repurposed for genome editing, interest in leveraging CRISPR systems lead to the discovery of several new Cas enzymes and CRISPR systems with novel properties (1-3). Notable amongst these new discoveries are the Class 2 type VI CRISPR-Cas13 systems, which use a single enzyme to target RNA using a programmable CRISPR-RNA (crRNA) guide (1-6). Cas13 binding to target single-stranded RNA activates a general RNase activity that cleaves the target and degrades surrounding RNA non-specifically (4). Type VI systems have been used for RNA knockdown, transcript labeling, RNA editing, and ultra-sensitive virus detection (3, 4, 7-12). CRISPR-Cas13 systems are further divided into four subtypes based on the identity of the Cas13 protein (Cas13a-d) (2). All Cas13 protein family members contain two Higher Eukaryotes and Prokaryotes Nucleotide-binding (HEPN) domains. Citation or identification of any document in this application is not an admission that such document is available as prior art to the present invention.

[0007] There exists a pressing need for alternative and robust systems and techniques for targeting nucleic acids or polynucleotides (e.g. DNA or RNA or any hybrid or derivative thereof) with a wide array of applications, in particular development of effector proteins having an altered functionality, such as including, but not limited to increased or decreased specificity, increased or decreased activity, altered specificity and/or activity, alternative PAM recognition, etc. This invention addresses this need and provides related advantages. Adding the novel RNA-targeting systems of the present application to the repertoire of genomic, transcriptomic, and epigenomic targeting technologies may transform the study and perturbation or editing of specific target sites through direct detection, analysis and manipulation. To utilize the RNA-targeting systems of the present application effectively for RNA targeting without deleterious effects, it is critical to understand aspects of engineering and optimization of these RNA targeting tools.

### SUMMARY

[0008] In one aspect, the present disclosure provides an engineered CRISPR-Cas protein comprising one or more HEPN domains and further comprising one or more modified amino acids, wherein the amino acids: interact with a guide RNA that forms a complex with the engineered CRISPR-Cas protein; are in a HEPN active site, an inter-domain linker domain, a lid domain, a helical domain 1, a helical domain 2, or a bridge helix domain of the engineered CRISPR-Cas protein; or a combination thereof.

[0009] In some embodiments, the HEPN domain comprises RxxxxH motif. In some embodiments, the RxxxxH motif comprises a R{N/H/K}X₁X₂X₃H (SEQ ID NO:78) sequence. In some embodiments, in the R{N/H/K}X₁X₂X₃H sequence, X₁ is R, S, D, E, Q, N, G, or Y, X₂ is independently I, S, T, V, or L, and X₃ is independently L, F, N, Y, V, I, S, D, E, or A.

[0010] In some embodiments, the CRISPR-Cas protein is a Type VI CRISPR Cas protein. In some embodiments, the Type VI CRISPR Cas protein is Cas13. In some embodiments, the Type VI CRISPR Cas protein is a Cas13a, a Cas13b, a Cas13c, or a Cas13d.

[0011] In some embodiments, one or more mutation of an amino acid corresponding to the following amino acids of Prevotella buccae Cas13b (PbCas13b): T405, H407, K457, H500, K570, K590, N634, R638, N652, N653, K655, S658, K741, K744, N756, S757, R762, R791, K846, K857, K870, R877, K183, K193, R600, K607, K612, R614, K617, K826, K828, K829, R824, R830, Q831, K835, K836, R838, R618, D434, K431, R53, K943, R1041, Y164, R285, R287, K292, E296, N297, Q646, N647, R402, K393, N653, N652, R482, N480, D396, E397, D398, E399, K294, E400, R56, N157, H161, H452, N455, K484, N486, G566, H567, A656, V795, A796, W842, K871, E873, R874, R1068, N1069, or H1073.

[0012] In some embodiments, one or more mutation of an amino acid corresponding to the following amino acids of Prevotella buccae Cas13b (PbCas13b): H407, K457, H500, K570, K590, N634, R638, N652, N653, K655, S658, K741, K744, N756, S757, R762, R791, K846, K857, K870, R877, K183, K193, R600, K607, K612, R614, K617, K826, K828, K829, R824, R830, Q831, K835, K836, R838, R618, D434, K431, R53, K943, R1041, Y164, R285, R287, K292, E296, N297, Q646, N647, R402, K393, N653, N652, R482, N480, D396, E397, D398, E399, K294, E400, R56, N157, H161, H452, N455, K484, N486, G566, H567, W842, K871, E873, R874, R1068, N1069, H1073.

[0013] In some embodiments, one or more mutation of an amino acid corresponding to the following amino acids of Prevotella buccae Cas13b (PbCas13b): T405, H407, K457, H500, K570, K590, N634, R638, N652, N653, K655, S658, K741, K744, N756, S757, R762, R791, K846, K857, K870, R877, K183, K193, R600, K607, K612, R614, K617, K826, K828, K829, R824, R830, Q831, K835, K836, R838, R618, D434, K431, R53, K943, R1041, Y164, R285, R287, K292, E296, N297, Q646, N647, R402, K393, N653, N652, R482, N480, D396, E397, D398, E399, K294, or E400.

[0014] In some embodiments, one or more mutation of an amino acid corresponding to the following amino acids of Prevotella buccae Cas13b (PbCas13b): K393, R402, N482, T405, H407, S658, N653, A656, K655, N652, H567, N455, H500, K871, K857, K870, W842, E873, R877, K846, R874, R762, V795, A796, R791, G566, K590, R638, H452, S757, N756, N486, K484, N480, K457, K741, R56, N157, H161, R1068, N1069, or H1073.

[0015] In some embodiments, one or more mutation of an amino acid corresponding to the following amino acids of PbCas13b: K393, R402, N482, H407, S658, N653, K655, N652, H567, N455, H500, K871, K857, K870, W842, E873, R877, K846, R874, R762, R791, G566, K590, R638, H452, S757, N756, N486, K484, N480, K457, K741, R56, N157, H161, R1068, N1069, or H1073.

[0016] In some embodiments, one or more mutation of an amino acid corresponding to the following amino acids of PbCas13b: W842, K846, K870, E873, or R877. In some embodiments, in helical domain 1 one or more mutation of an amino acid corresponding to the following amino acids in helical domain 1 of PbCas13b: W842, K846, K870, E873, or R877. In some embodiments, in helical domain 1-3 one or more mutation of an amino acid corresponding to the following amino acids in helical domain 1-3 of PbCas13b: W842, K846, K870, E873, or R877. In some embodiments, in the bridge helix domain one or more mutation of an amino acid corresponding to the following amino acids in the bridge helix domain of PbCas13b: W842, K846, K870, E873, or R877. In some embodiments, one or more mutation of an amino acid corresponding to the following amino acids of PbCas13b: K393, R402, N480, N482, N652, or N653. In some embodiments, one or more mutation of an amino acid corresponding to the following amino acids of PbCas13b: K393, R402, N480, or N482. In some embodiments, in the LID domain one or more mutation of an amino acid corresponding to the following amino acids in the LID domain of PbCas13b: K393, R402, N480, or N482. In some embodiments, one or more mutation of an amino acid corresponding to the following amino acids of PbCas13b: N652 or N653. In some embodiments, in helical domain 2 one or more mutation of an amino acid corresponding to the following amino acids in helical domain 2 of PbCas13b: N652 or N653. In some embodiments, one or more mutation of an amino acid corresponding to the following amino acids of PbCas13b: T405, H407, S658, N653, A656, K655, N652, H567, N455, H500, K871, K857, K870, W842, E873, R877, K846, R874, R762, V795, A796, R791, G566, K590, R638, H452, S757, N756, N486, K484, N480, K457, or K741. In some embodiments, one or more mutation of an amino acid corresponding to the following amino acids of PbCas13b: H407, S658, N653, K655, N652, H567, N455, H500, K871, K857, K870, W842, E873, R877, K846, R874, R762, R791, G566, K590, R638, H452, S757, N756, N486, K484, N480, K457, or K741. In some embodiments, one or more mutation of an amino acid corresponding to the following amino acids of PbCas13b: S658, N653, A656, K655, N652, H567, H500, K871, K857, K870, W842, E873, R877, K846, R874, R762, V795, A796, R791, G566, K590, R638, S757, N756, or K741. In some embodiments, in a helical domain one or more mutation of an amino acid corresponding to the following amino acids in a helical domain of PbCas13b: S658, N653, A656, K655, N652, H567, H500, K871, K857, K870, W842, E873, R877, K846, R874, R762, V795, A796, R791, G566, K590, R638, S757, N756, or K741. In some embodiments, one or more mutation of an amino acid corresponding to the following amino acids of PbCas13b: H567, H500, K871, K857, K870, W842, E873, R877, K846, R874, R762, V795, A796, R791, G566, S757, or N756.

[0017] In some embodiments, in helical domain 1 one or more mutation of an amino acid corresponding to the following amino acids in helical domain 1 of PbCas13b: H567, H500, K871, K857, K870, W842, E873, R877, K846, R874, R762, V795, A796, R791, G566, S757, or N756. In some embodiments, one or more mutation of an amino acid corresponding to the following amino acids of PbCas13b: H567, H500, R762, V795, A796, R791, G566, S757, or N756. In some embodiments, in helical domain 1 one or more mutation of an amino acid corresponding to the following amino acids in helical domain 1 of PbCas13b: H567, H500, R762, V795, A796, R791, G566, S757, or N756. In some embodiments, one or more mutation of an amino acid corresponding to the following amino acids of PbCas13b: K871, K857, K870, W842, E873, R877, K846, or R874. In some embodiments, in the bridge helix domain one or more mutation of an amino acid corresponding to the following amino acids in the bridge helix domain of PbCas13b: K871, K857, K870, W842, E873, R877, K846, or R874. In some embodiments, one or more mutation of an amino acid corresponding to the following amino acids of PbCas13b: H567, H500, or G566.

[0018] In some embodiments, in helical domain 1-2 one or more mutation of an amino acid corresponding to the following amino acids in helical domain 1-2 of PbCas13b: H567, H500, or G566. In some embodiments, one or more mutation of an amino acid corresponding to the following amino acids of PbCas13b: K871, K857, K870, W842, E873, R877, K846, R874, R762, V795, A796, R791, S757, or N756. In some embodiments, in helical domain 1-3 one or more mutation of an amino acid corresponding to the following amino acids in helical domain 1-3 of PbCas13b: K871, K857, K870, W842, E873, R877, K846, R874, R762, V795, A796, R791, S757, or N756. In some embodiments, one or more mutation of an amino acid corresponding to the following amino acids of PbCas13b: R762, V795, A796, R791, S757, or N756. In some embodiments, in helical domain 1-3 one or more mutation of an amino acid corresponding to the following amino acids in helical domain 1-3 of PbCas13b: R762, V795, A796, R791, S757, or N756. In some embodiments, one or more mutation of an amino acid corresponding to the following amino acids of PbCas13b: S658, N653, A656, K655, N652, K590, R638, or K741. In some embodiments, in helical domain 2 one or more mutation of an amino acid corresponding to the following amino acids in helical domain 2 of PbCas13b: S658, N653, A656, K655, N652, K590, R638, or K741. In some embodiments, one or more mutation of an amino acid corresponding to the following amino acids of PbCas13b: T405, H407, N486, K484, N480, H452, N455, or K457. In some embodiments, in the LID domain one or more mutation of an amino acid corresponding to the following amino acids in the LID domain of PbCas13b: T405, H407, N486, K484, N480, H452, N455, or K457. In some embodiments, one or more mutation of an amino acid corresponding to the following amino acids of PbCas13b: S658, N653, K655, N652, H567, H500, K871, K857, K870, W842, E873, R877, K846, R874, R762, R791, G566, K590, R638, S757, N756, or K741. In some embodiments, in a helical domain one or more mutation of an amino acid corresponding to the following amino acids in a helical domain of PbCas13b: S658, N653, K655, N652, H567, H500, K871, K857, K870, W842, E873, R877, K846, R874, R762, R791, G566, K590, R638, S757, N756, or K741. In some embodiments, one or more mutation of an amino acid corresponding to the following amino acids of PbCas13b: H567, H500, K871, K857, K870, W842, E873, R877, K846, R874, R762, R791, G566, S757, or N756. In some embodiments, in helical domain 1 one or more mutation of an amino acid corresponding to the following amino acids in helical domain 1 of PbCas13b: H567, H500, K871, K857, K870, W842, E873, R877, K846, R874, R762, R791, G566, S757, or N756. In some embodiments, one or more mutation of an amino acid corresponding to the following amino acids of PbCas13b: H567, H500, R762, R791, G566, S757, or N756. In some embodiments, in helical domain 1 one or more mutation of an amino acid corresponding to the following amino acids in helical domain 1 of PbCas13b: H567, H500, R762, R791, G566, S757, or N756. In some embodiments, one or more mutation of an amino acid corresponding to the following amino acids of PbCas13b: K871, K857, K870, W842, E873, R877, K846, R874, R762, R791, S757, or N756. In some embodiments, in helical domain 1-3 one or more mutation of an amino acid corresponding to the following amino acids in helical domain 1-3 of PbCas13b: K871, K857, K870, W842, E873, R877, K846, R874, R762, R791, S757, or N756.

[0019] In some embodiments, one or more mutation of an amino acid corresponding to the following amino acids of PbCas13b: R762, R791, S757, or N756. In some embodiments, in helical domain 1-3 one or more mutation of an amino acid corresponding to the following amino acids in helical domain 1-3 of PbCas13b: R762, R791, S757, or N756. In some embodiments, one or more mutation of an amino acid corresponding to the following amino acids of PbCas13b: S658, N653, K655, N652, K590, R638, or K741. In some embodiments, in helical domain 2 one or more mutation of an amino acid corresponding to the following amino acids in helical domain 2 of PbCas13b: S658, N653, K655, N652, K590, R638, or K741. In some embodiments, one or more mutation of an amino acid corresponding to the following amino acids of PbCas13b: H407, N486, K484, N480, H452, N455, or K457.

[0020] In some embodiments, in the LID domain one or more mutation of an amino acid corresponding to the following amino acids in the LID domain of PbCas13b: H407, N486, K484, N480, H452, N455, or K457. In some embodiments, one or more mutation of an amino acid corresponding to the following amino acids of PbCas13b: R56, N157, H161, R1068, N1069, or H1073. In some embodiments, in a HEPN domain one or more mutation of an amino acid corresponding to the following amino acids in a HEPN domain of PbCas13b: R56, N157, H161, R1068, N1069, or H1073. In some embodiments, one or more mutation of an amino acid corresponding to the following amino acids of PbCas13b: R56, N157, or H161. In some embodiments, in HEPN domain 1 one or more mutation of an amino acid corresponding to the following amino acids in HEPN domain 1 of PbCas13b: R56, N157, or H161. In some embodiments, one or more mutation of an amino acid corresponding to the following amino acids of PbCas13b: R1068, N1069, or H1073. In some embodiments, in HEPN domain 2 one or more mutation of an amino acid corresponding to the following amino acids in HEPN domain 2 of PbCas13b: R1068, N1069, or H1073. In some embodiments, one or more mutation of an amino acid corresponding to the following amino acids of PbCas13b: K393, R402, N482, T405, H407, N486, K484, N480, H452, N455, or K457. In some embodiments, in the LID domain one or more mutation of an amino acid corresponding to the following amino acids in the LID domain of PbCas13b: K393, R402, N482, T405, H407, N486, K484, N480, H452, N455, or K457. In some embodiments, one or more mutation of an amino acid corresponding to the following amino acids of PbCas13b: K393, R402, N482, H407, N486, K484, N480, H452, N455, or K457. In some embodiments, in the LID domain one or more mutation of an amino acid corresponding to the following amino acids in the LID domain of PbCas13b: K393, R402, N482, H407, N486, K484, N480, H452, N455, or K457. In some embodiments, one or more mutation of an amino acid corresponding to the following amino acids of PbCas13b: T405, H407, S658, N653, A656, K655, N652, H567, N455, H500, K871, K857, K870, W842, E873, R877, K846, R874, R762, V795, A796, R791, G566, K590, R638, H452, S757, N756, N486, K484, N480, K457, K741, K393, R402, or N482. In some embodiments, one or more mutation of an amino acid corresponding to the following amino acids of PbCas13b: H407, S658, N653, K655, N652, H567, N455, H500, K871, K857, K870, W842, E873, R877, K846, R874, R762, R791, G566, K590, R638, H452, S757, N756, N486, K484, N480, K457, K741, K393, R402, or N482. In some embodiments, one or more mutation of an amino acid corresponding to the following amino acids of PbCas13b: S658, N653, A656, K655, N652, H567, N455, H500, K871, K857, K870, W842, E873, R877, K846, R874, R762, V795, A796, R791, G566, K590, R638, H452, S757, N756, N486, K484, N480, K457, or K741. In some embodiments, one or more mutation of an amino acid corresponding to the following amino acids of PbCas13b: S658, N653, K655, N652, H567, N455, H500, K871, K857, K870, W842, E873, R877, K846, R874, R762, R791, G566, K590, R638, H452, S757, N756, N486, K484, N480, K457, or K741. In some embodiments, one or more mutation of an amino acid corresponding to the following amino acids of PbCas13b: N486, K484, N480, H452, N455, or K457.

[0021] In some embodiments, in the LID domain one or more mutation of an amino acid corresponding to the following amino acids in the LID domain of PbCas13b: N486, K484, N480, H452, N455, or K457. In some embodiments, one or more mutation of an amino acid corresponding to the following amino acids of PbCas13b: K393, R402, N482, N486, K484, N480, H452, N455, or K457. In some embodiments, in the LID domain one or more mutation of an amino acid corresponding to the following amino acids in the LID domain of PbCas13b: K393, R402, N482, N486, K484, N480, H452, N455, or K457. In some embodiments, one or more mutation of an amino acid corresponding to the following amino acids of PbCas13b: S658, N653, A656, K655, N652, H567, N455, H500, K871, K857, K870, W842, E873, R877, K846, R874, R762, V795, A796, R791, G566, K590, R638, H452, S757, N756, N486, K484, N480, K457, K741, K393, R402, or N482. In some embodiments, one or more mutation of an amino acid corresponding to the following amino acids of PbCas13b: S658, N653, K655, N652, H567, N455, H500, K871, K857, K870, W842, E873, R877, K846, R874, R762, R791, G566, K590, R638, H452, S757, N756, N486, K484, N480, K457, K741, K393, R402, or N482.

[0022] In some embodiments, one or more mutation of an amino acid corresponding to the following amino acids of Prevotella buccae Cas13b (PbCas13b): R53, Y164, K943, or R1041. In some embodiments, one or more mutation of an amino acid corresponding to the following amino acids of Prevotella buccae Cas13b (PbCas13b): R53 or Y164. In some embodiments, one or more mutation of an amino acid corresponding to the following amino acids of Prevotella buccae Cas13b (PbCas13b): K943 or R1041. In some embodiments, in a HEPN domain one or more mutation of an amino acid corresponding to the following amino acids in a HEPN domain of Prevotella buccae Cas13b (PbCas13b): R53, Y164, K943, or R1041. In some embodiments, in HEPN domain 1 one or more mutation of an amino acid corresponding to the following amino acids in HEPN domain 1 of Prevotella buccae Cas13b (PbCas13b): R53 or Y164. In some embodiments, in HEPN domain 2 one or more mutation of an amino acid corresponding to the following amino acids in HEPN domain 2 of Prevotella buccae Cas13b (PbCas13b): K943 or R1041. In some embodiments, one or more mutation of an amino acid corresponding to the following amino acids of Prevotella buccae Cas13b (PbCas13b): R53, Y164, K943, R1041, R56, N157, H161, R1068, N1069, or H1073. In some embodiments, one or more mutation of an amino acid corresponding to the following amino acids of Prevotella buccae Cas13b (PbCas13b): R53, Y164, R56, N157, or H161. In some embodiments, one or more mutation of an amino acid corresponding to the following amino acids of Prevotella buccae Cas13b (PbCas13b): K943, R1041, R1068, N1069, or H1073. In some embodiments, in a HEPN domain one or more mutation of an amino acid corresponding to the following amino acids in a HEPN domain of Prevotella buccae Cas13b (PbCas13b): R53, Y164, K943, R1041, R56, N157, H161, R1068, N1069, or H1073. In some embodiments, in HEPN domain 1 one or more mutation of an amino acid corresponding to the following amino acids in HEPN domain 1 of Prevotella buccae Cas13b (PbCas13b): R53, Y164, R56, N157, or H161. In some embodiments, in HEPN domain 2 one or more mutation of an amino acid corresponding to the following amino acids in HEPN domain 2 of Prevotella buccae Cas13b (PbCas13b): K943, R1041, R1068, N1069, or H1073. In some embodiments, one or more mutation of an amino acid corresponding to the following amino acids of Prevotella buccae Cas13b (PbCas13b): R53, Y164, K183, K193, K943, or R1041. In some embodiments, one or more mutation of an amino acid corresponding to the following amino acids of Prevotella buccae Cas13b (PbCas13b): R53, Y164, K183, or K193. In some embodiments, one or more mutation of an amino acid corresponding to the following amino acids of Prevotella buccae Cas13b (PbCas13b): K943 or R1041.

[0023] In some embodiments, in a HEPN domain one or more mutation of an amino acid corresponding to the following amino acids in a HEPN domain of Prevotella buccae Cas13b (PbCas13b): R53, Y164, K183, K193, K943, or R1041. In some embodiments, in HEPN domain 1 one or more mutation of an amino acid corresponding to the following amino acids in HEPN domain 1 of Prevotella buccae Cas13b (PbCas13b): R53, Y164, K183, or K193. In some embodiments, in HEPN domain 2 one or more mutation of an amino acid corresponding to the following amino acids in HEPN domain 2 of Prevotella buccae Cas13b (PbCas13b): K943 or R1041. In some embodiments, one or more mutation of an amino acid corresponding to the following amino acids of Prevotella buccae Cas13b (PbCas13b): R53, Y164, K183, K193, K943, R1041, R56, N157, H161, R1068, N1069, or H1073. In some embodiments, one or more mutation of an amino acid corresponding to the following amino acids of Prevotella buccae Cas13b (PbCas13b): R53, Y164, K183, K193, R56, N157, or H161. In some embodiments, one or more mutation of an amino acid corresponding to the following amino acids of Prevotella buccae Cas13b (PbCas13b): K943, R1041, R1068, N1069, or H1073. In some embodiments, in a HEPN domain one or more mutation of an amino acid corresponding to the following amino acids in a HEPN domain of Prevotella buccae Cas13b (PbCas13b): R53, Y164, K183, K193, K943, R1041, R56, N157, H161, R1068, N1069, or H1073. In some embodiments, in HEPN domain 1 one or more mutation of an amino acid corresponding to the following amino acids in HEPN domain 1 of Prevotella buccae Cas13b (PbCas13b): R53, Y164, K183, K193, R56, N157, or H161.

[0024] In some embodiments, in HEPN domain 2 one or more mutation of an amino acid corresponding to the following amino acids in HEPN domain 2 of Prevotella buccae Cas13b (PbCas13b): K943, R1041, R1068, N1069, or H1073. In some embodiments, one or more mutation of an amino acid corresponding to the following amino acids of Prevotella buccae Cas13b (PbCas13b): K183 or K193. In some embodiments, in HEPN domain 1 one or more mutation of an amino acid corresponding to the following amino acids in HEPN domain 1 of Prevotella buccae Cas13b (PbCas13b): K183 or K193. In some embodiments, one or more mutation of an amino acid corresponding to the following amino acids of Prevotella buccae Cas13b (PbCas13b): R53, Y164, K943, or R1041. In some embodiments, in a HEPN domain one or more mutation of an amino acid corresponding to the following amino acids in a HEPN domain of Prevotella buccae Cas13b (PbCas13b): R53, Y164, K943, or R1041. In some embodiments, one or more mutation of an amino acid corresponding to the following amino acids of Prevotella buccae Cas13b (PbCas13b): R53, K943, or R1041; preferably R53A, R53K, R53D, or R53E; K943A, K943R, K943D, or K943E; or R1041A, R1041K, R1041D, or R1041E. In some embodiments, in a HEPN domain one or more mutation of an amino acid corresponding to the following amino acids in a HEPN domain of Prevotella buccae Cas13b (PbCas13b): R53, K943, or R1041; preferably R53A, R53K, R53D, or R53E; K943A, K943R, K943D, or K943E; or R1041A, R1041K, R1041D, or R1041E. In some embodiments, a mutation of an amino acid corresponding to amino acid Y164 of Prevotella buccae Cas13b (PbCas13b), preferably Y164A, Y164F, or Y164W.

[0025] In some embodiments, HEPN domain 1 a mutation of an amino acid corresponding to amino acid Y164 HEPN domain 1 of Prevotella buccae Cas13b (PbCas13b), preferably Y164A, Y164F, or Y164W. In some embodiments, one or more mutation of an amino acid corresponding to the following amino acids of Prevotella buccae Cas13b (PbCas13b): T405, H407, K457, D434, K431, R402, K393, R482, N480, D396, E397, D398, or E399. In some embodiments, in the LID domain one or more mutation of an amino acid corresponding to the following amino acids in the LID domain of Prevotella buccae Cas13b (PbCas13b): T405, H407, K457, D434, K431, R402, K393, R482, N480, D396, E397, D398, or E399. In some embodiments, a mutation of an amino acid corresponding to amino acid H407 of Prevotella buccae Cas13b (PbCas13b), preferably H407Y, H407W, or H407F. In some embodiments, one or more mutation of an amino acid corresponding to the following amino acids of Prevotella buccae Cas13b (PbCas13b): R402, K393, R482, N480, D396, E397, D398, or E399. In some embodiments, in the LID domain one or more mutation of an amino acid corresponding to the following amino acids in the LID domain of Prevotella buccae Cas13b (PbCas13b): R402, K393, R482, N480, D396, E397, D398, or E399. In some embodiments, one or more mutation of an amino acid corresponding to the following amino acids of Prevotella buccae Cas13b (PbCas13b): K457, D434, or K431. In some embodiments, in the LID domain one or more mutation of an amino acid corresponding to the following amino acids in the LID domain of Prevotella buccae Cas13b (PbCas13b): K457, D434, or K431.

[0026] In some embodiments, one or more mutation of an amino acid corresponding to the following amino acids of Prevotella buccae Cas13b (PbCas13b): H500, K570, K590, N634, R638, N652, N653, K655, S658, K741, K744, N756, S757, R762, R791, K846, K857, K870, R877, R600, K607, K612, R614, K617, K826, K828, K829, R824, R830, Q831, K835, K836, R838, R618, Q646, N647, N653, or N652. In some embodiments, in a helical domain one or more mutation of an amino acid corresponding to the following amino acids in a helical domain of Prevotella buccae Cas13b (PbCas13b): H500, K570, K590, N634, R638, N652, N653, K655, S658, K741, K744, N756, S757, R762, R791, K846, K857, K870, R877, R600, K607, K612, R614, K617, K826, K828, K829, R824, R830, Q831, K835, K836, R838, R618, Q646, N647, N653, or N652. In some embodiments, one or more mutation of an amino acid corresponding to the following amino acids of Prevotella buccae Cas13b (PbCas13b): H500, K570, N756, S757, R762, R791, K846, K857, K870, R877, K826, K828, K829, R824, R830, Q831, K835, K836, or R838. In some embodiments, in helical domain 1 one or more mutation of an amino acid corresponding to the following amino acids in helical domain 1 of Prevotella buccae Cas13b (PbCas13b): H500, K570, N756, S757, R762, R791, K846, K857, K870, R877, K826, K828, K829, R824, R830, Q831, K835, K836, or R838. In some embodiments, one or more mutation of an amino acid corresponding to the following amino acids of Prevotella buccae Cas13b (PbCas13b): H500, K570, N756, S757, R762, or R791. In some embodiments, in helical domain 1 one or more mutation of an amino acid corresponding to the following amino acids in helical domain 1 of Prevotella buccae Cas13b (PbCas13b): H500, K570, N756, S757, R762, or R791.

[0027] In some embodiments, one or more mutation of an amino acid corresponding to the following amino acids of Prevotella buccae Cas13b (PbCas13b): K846, K857, K870, R877, K826, K828, K829, R824, R830, Q831, K835, K836, or R838. In some embodiments, in the bridge helix domain one or more mutation of an amino acid corresponding to the following amino acids in the bridge helix domain of Prevotella buccae Cas13b (PbCas13b): K846, K857, K870, R877, K826, K828, K829, R824, R830, Q831, K835, K836, or R838. In some embodiments, one or more mutation of an amino acid corresponding to the following amino acids of Prevotella buccae Cas13b (PbCas13b): H500 or K570. In some embodiments, in helical domain 1-2 one or more mutation of an amino acid corresponding to the following amino acids in helical domain 1-2 of Prevotella buccae Cas13b (PbCas13b): H500 or K570. In some embodiments, one or more mutation of an amino acid corresponding to the following amino acids of Prevotella buccae Cas13b (PbCas13b): N756, S757, R762, R791, K846, K857, K870, R877, K826, K828, K829, R824, R830, Q831, K835, K836, or R838. In some embodiments, in helical domain 1-3 one or more mutation of an amino acid corresponding to the following amino acids in helical domain 1-3 of Prevotella buccae Cas13b (PbCas13b): N756, S757, R762, R791, K846, K857, K870, R877, K826, K828, K829, R824, R830, Q831, K835, K836, or R838. In some embodiments, one or more mutation of an amino acid corresponding to the following amino acids of Prevotella buccae Cas13b (PbCas13b): N756, S757, R762, or R791. In some embodiments, in helical domain 1-3 one or more mutation of an amino acid corresponding to the following amino acids in helical domain 1-3 of Prevotella buccae Cas13b (PbCas13b): N756, S757, R762, or R791. In some embodiments, one or more mutation of an amino acid corresponding to the following amino acids of Prevotella buccae Cas13b (PbCas13b): N756, S757, R762, R791, K846, K857, K870, or R877. In some embodiments, in helical domain 1-3 one or more mutation of an amino acid corresponding to the following amino acids in helical domain 1-3 of Prevotella buccae Cas13b (PbCas13b): N756, S757, R762, R791, K846, K857, K870, or R877. In some embodiments, one or more mutation of an amino acid corresponding to the following amino acids of Prevotella buccae Cas13b (PbCas13b): K826, K828, K829, R824, R830, Q831, K835, K836, or R838. In some embodiments, in helical domain 1-3 one or more mutation of an amino acid corresponding to the following amino acids in helical domain 1-3 of Prevotella buccae Cas13b (PbCas13b): K826, K828, K829, R824, R830, Q831, K835, K836, or R838. In some embodiments, one or more mutation of an amino acid corresponding to the following amino acids of Prevotella buccae Cas13b (PbCas13b): K590, N634, R638, N652, N653, K655, S658, K741, K744, R600, K607, K612, R614, K617, R618, Q646, N647, N653, or N652. In some embodiments, in helical domain 2 one or more mutation of an amino acid corresponding to the following amino acids in helical domain 2 of Prevotella buccae Cas13b (PbCas13b): K590, N634, R638, N652, N653, K655, S658, K741, K744, R600, K607, K612, R614, K617, R618, Q646, N647, N653, or N652.

[0028] In some embodiments, one or more mutation of an amino acid corresponding to the following amino acids of Prevotella buccae Cas13b (PbCas13b): Q646 or N647. In some embodiments, in helical domain 2 one or more mutation of an amino acid corresponding to the following amino acids in helical domain 2 of Prevotella buccae Cas13b (PbCas13b): Q646 or N647. In some embodiments, one or more mutation of an amino acid corresponding to the following amino acids of Prevotella buccae Cas13b (PbCas13b): N653 or N652. In some embodiments, in helical domain 2 one or more mutation of an amino acid corresponding to the following amino acids in helical domain 2 of Prevotella buccae Cas13b (PbCas13b): N653 or N652. In some embodiments, one or more mutation of an amino acid corresponding to the following amino acids of Prevotella buccae Cas13b (PbCas13b): K590, N634, R638, N652, N653, K655, S658, K741, or K744. In some embodiments, in helical domain 2 one or more mutation of an amino acid corresponding to the following amino acids in helical domain 2 of Prevotella buccae Cas13b (PbCas13b): K590, N634, R638, N652, N653, K655, S658, K741, or K744. In some embodiments, one or more mutation of an amino acid corresponding to the following amino acids of Prevotella buccae Cas13b (PbCas13b): R600, K607, K612, R614, K617, or R618. In some embodiments, in helical domain 2 one or more mutation of an amino acid corresponding to the following amino acids in helical domain 2 of Prevotella buccae Cas13b (PbCas13b): R600, K607, K612, R614, K617, or R618. In some embodiments, one or more mutation of an amino acid corresponding to the following amino acids of Prevotella buccae Cas13b (PbCas13b): R285, R287, K292, E296, N297, or K294. In some embodiments, in the IDL domain one or more mutation of an amino acid corresponding to the following amino acids in the IDL domain of Prevotella buccae Cas13b (PbCas13b): R285, R287, K292, E296, N297, or K294. In some embodiments, one or more mutation of an amino acid corresponding to the following amino acids of Prevotella buccae Cas13b (PbCas13b): R285, K292, E296, or N297. In some embodiments, in the IDL domain one or more mutation of an amino acid corresponding to the following amino acids in the IDL domain of Prevotella buccae Cas13b (PbCas13b): R285, K292, E296, or N297.

[0029] In some embodiments, one or more mutation of an amino acid corresponding to the following amino acids of Prevotella buccae Cas13b (PbCas13b): T405, H500, K570, K590, N634, R638, N652, N653, K655, S658, K741, K744, N756, S757, R762, R791, K846, K857, K870, R877, K183, K193, R600, K607, K612, R614, K617, K826, K828, K829, R824, R830, Q831, K835, K836, R838, R618, D434, K431, R285, R287, K292, E296, N297, Q646, N647, or K294. In some embodiments, one or more mutation of an amino acid corresponding to the following amino acids of Prevotella buccae Cas13b (PbCas13b): R402, K393, N653, N652, R482, N480, D396, E397, D398, or E399. In some embodiments, one or more mutation of an amino acid corresponding to the following amino acids of Prevotella buccae Cas13b (PbCas13b): R53, K655, R762, or R1041; preferably R53A or R53D; K655A; R762A; or R1041E or R1041D. In some embodiments, one or more mutation of an amino acid corresponding to the following amino acids of Prevotella buccae Cas13b (PbCas13b): N297, E296, K292, or R285; preferably N297A, E296A, K292A, or R285A. In some embodiments, in (the central channel of) the IDL domain one or more mutation of an amino acid corresponding to the following amino acids in (the central channel of) the IDL domain of Prevotella buccae Cas13b (PbCas13b): N297, E296, K292, or R285; preferably N297A, E296A, K292A, or R285A. In some embodiments, one or more mutation of an amino acid corresponding to the following amino acids of Prevotella buccae Cas13b (PbCas13b): Q831, K836, R838, N652, N653, R830, K655 or R762; preferably Q831A, K836A, R838A, N652A, N653A, R830A, K655A, or R762A. In some embodiments, one or more mutation of an amino acid corresponding to the following amino acids of Prevotella buccae Cas13b (PbCas13b): N652, N653, R830, K655 or R762; preferably N652A, N653A, R830A, K655A, or R762A. In some embodiments, one or more mutation of an amino acid corresponding to the following amino acids of Prevotella buccae Cas13b (PbCas13b): K655 or R762; preferably K655A or R762A. In some embodiments, in a helical domain one or more mutation of an amino acid corresponding to the following amino acids in a helical domain of Prevotella buccae Cas13b (PbCas13b): Q831, K836, R838, N652, N653, R830, K655 or R762; preferably Q831A, K836A, R838A, N652A, N653A, R830A, K655A, or R762A.

[0030] In some embodiments, a helical domain one or more mutation of an amino acid corresponding to the following amino acids a helical domain of Prevotella buccae Cas13b (PbCas13b): N652, N653, R830, K655 or R762; preferably N652A, N653A, R830A, K655A, or R762A. In some embodiments, in helical domain 2 one or more mutation of an amino acid corresponding to the following amino acids in helical domain 2 of Prevotella buccae Cas13b (PbCas13b): K655 or R762; preferably K655A or R762A. In some embodiments, one or more mutation of an amino acid corresponding to the following amino acids of Prevotella buccae Cas13b (PbCas13b): R614, K607, K193, K183 or R600; preferably R614A, K607A, K193A, K183A or R600A. In some embodiments, in the trans-subunit loop of helical domain 2 one or more mutation of an amino acid corresponding to the following amino acids in the trans-subunit loop of helical domain 2 of Prevotella buccae Cas13b (PbCas13b): Q646 or N647; preferably Q646A or N647A. In some embodiments, one or more mutation of an amino acid corresponding to the following amino acids of Prevotella buccae Cas13b (PbCas13b): R53 or R1041; preferably R53A or R53D, or R1041E or R1041D. In some embodiments, in a HEPN domain one or more mutation of an amino acid corresponding to the following amino acids in a HEPN domain of Prevotella buccae Cas13b (PbCas13b): R53 or R1041; preferably R53A or R53D, or R1041E or R1041D. In some embodiments, one or more mutation of an amino acid corresponding to the following amino acids of Prevotella buccae Cas13b (PbCas13b): K457, D397, E398, D399, E400, T405, H407 or D434; preferably D397A, E398A, D399A, E400A, T405A, H407A, H407W, H407Y, H407F or D434A. In some embodiments, in the LID domain one or more mutation of an amino acid corresponding to the following amino acids in the LID domain of Prevotella buccae Cas13b (PbCas13b): K457, D397, E398, D399, E400, T405, H407 or D434; preferably D397A, E398A, D399A, E400A, T405A, H407A, H407W, H407Y, H407F or D434A. In some embodiments, the amino acids correspond to the following amino acids of Prevotella buccae Cas13b (PbCas13b): amino acids 46-57, 73-79, 152-164, 1036-1046, and 1064-1074. In some embodiments, one or more mutation of an amino acid corresponding to the following amino acids of Prevotella buccae Cas13b (PbCas13b): R156, N157, H161, R1068, N1069, and H1073. In some embodiments, one or more mutation of an amino acid corresponding to the following amino acids of Prevotella buccae Cas13b (PbCas13b): R285, R287, K292, K294, E296, and N297. In some embodiments, one or more mutation of an amino acid corresponding to the following amino acids of Prevotella buccae Cas13b (PbCas13b): K826, K828, K829, R824, R830, Q831, K835, K836, and R838. In some embodiments, one or more mutation of an amino acid corresponding to the following amino acids of Prevotella buccae Cas13b (PbCas13b): T405, H407, K457, H500, K570, K590, N634, R638, N652, N653, K655, S658, K741, K744, N756, S757, R762, R791, K846, K857, K870, and R877.

[0031] In some embodiments, a mutation of an amino acid corresponding to amino acid T405 of Prevotella buccae Cas13b (PbCas13b). In some embodiments, a mutation of an amino acid corresponding to amino acid H407 of Prevotella buccae Cas13b (PbCas13b). In some embodiments, a mutation of an amino acid corresponding to amino acid K457 of Prevotella buccae Cas13b (PbCas13b). In some embodiments, a mutation of an amino acid corresponding to amino acid H500 of Prevotella buccae Cas13b (PbCas13b). In some embodiments, a mutation of an amino acid corresponding to amino acid K570 of Prevotella buccae Cas13b (PbCas13b). In some embodiments, a mutation of an amino acid corresponding to amino acid K590 of Prevotella buccae Cas13b (PbCas13b).

[0032] In some embodiments, a mutation of an amino acid corresponding to amino acid N634 of Prevotella buccae Cas13b (PbCas13b). In some embodiments, a mutation of an amino acid corresponding to amino acid R638 of Prevotella buccae Cas13b (PbCas13b). In some embodiments, a mutation of an amino acid corresponding to amino acid N652 of Prevotella buccae Cas13b (PbCas13b). In some embodiments, a mutation of an amino acid corresponding to amino acid N653 of Prevotella buccae Cas13b (PbCas13b). In some embodiments, a mutation of an amino acid corresponding to amino acid K655 of Prevotella buccae Cas13b (PbCas13b). In some embodiments, a mutation of an amino acid corresponding to amino acid S658 of Prevotella buccae Cas13b (PbCas13b). In some embodiments, a mutation of an amino acid corresponding to amino acid K741 of Prevotella buccae Cas13b (PbCas13b). In some embodiments, a mutation of an amino acid corresponding to amino acid K744 of Prevotella buccae Cas13b (PbCas13b). In some embodiments, a mutation of an amino acid corresponding to amino acid N756 of Prevotella buccae Cas13b (PbCas13b). In some embodiments, a mutation of an amino acid corresponding to amino acid S757 of Prevotella buccae Cas13b (PbCas13b). In some embodiments, a mutation of an amino acid corresponding to amino acid R762 of Prevotella buccae Cas13b (PbCas13b). In some embodiments, a mutation of an amino acid corresponding to amino acid R791 of Prevotella buccae Cas13b (PbCas13b). In some embodiments, a mutation of an amino acid corresponding to amino acid K846 of Prevotella buccae Cas13b (PbCas13b). In some embodiments, a mutation of an amino acid corresponding to amino acid K857 of Prevotella buccae Cas13b (PbCas13b). In some embodiments, a mutation of an amino acid corresponding to amino acid K870 of Prevotella buccae Cas13b (PbCas13b). In some embodiments, a mutation of an amino acid corresponding to amino acid R877 of Prevotella buccae Cas13b (PbCas13b). In some embodiments, a mutation of an amino acid corresponding to amino acid K183 of Prevotella buccae Cas13b (PbCas13b). In some embodiments, a mutation of an amino acid corresponding to amino acid K193 of Prevotella buccae Cas13b (PbCas13b). In some embodiments, a mutation of an amino acid corresponding to amino acid R600 of Prevotella buccae Cas13b (PbCas13b). In some embodiments, a mutation of an amino acid corresponding to amino acid K607 of Prevotella buccae Cas13b (PbCas13b). In some embodiments, a mutation of an amino acid corresponding to amino acid K612 of Prevotella buccae Cas13b (PbCas13b). In some embodiments, a mutation of an amino acid corresponding to amino acid R614 of Prevotella buccae Cas13b (PbCas13b). In some embodiments, a mutation of an amino acid corresponding to amino acid K617 of Prevotella buccae Cas13b (PbCas13b). In some embodiments, a mutation of an amino acid corresponding to amino acid K826 of Prevotella buccae Cas13b (PbCas13b). In some embodiments, a mutation of an amino acid corresponding to amino acid K828 of Prevotella buccae Cas13b (PbCas13b). In some embodiments, a mutation of an amino acid corresponding to amino acid K829 of Prevotella buccae Cas13b (PbCas13b). In some embodiments, a mutation of an amino acid corresponding to amino acid R824 of Prevotella buccae Cas13b (PbCas13b). In some embodiments, a mutation of an amino acid corresponding to amino acid R830 of Prevotella buccae Cas13b (PbCas13b). In some embodiments, a mutation of an amino acid corresponding to amino acid Q831 of Prevotella buccae Cas13b (PbCas13b). In some embodiments, a mutation of an amino acid corresponding to amino acid K835 of Prevotella buccae Cas13b (PbCas13b). In some embodiments, a mutation of an amino acid corresponding to amino acid K836 of Prevotella buccae Cas13b (PbCas13b). In some embodiments, a mutation of an amino acid corresponding to amino acid R838 of Prevotella buccae Cas13b (PbCas13b). In some embodiments, a mutation of an amino acid corresponding to amino acid R618 of Prevotella buccae Cas13b (PbCas13b). In some embodiments, a mutation of an amino acid corresponding to amino acid D434 of Prevotella buccae Cas13b (PbCas13b). In some embodiments, a mutation of an amino acid corresponding to amino acid K431 of Prevotella buccae Cas13b (PbCas13b). In some embodiments, a mutation of an amino acid corresponding to amino acid R53 of Prevotella buccae Cas13b (PbCas13b). In some embodiments, a mutation of an amino acid corresponding to amino acid K943 of Prevotella buccae Cas13b (PbCas13b). In some embodiments, a mutation of an amino acid corresponding to amino acid R1041 of Prevotella buccae Cas13b (PbCas13b). In some embodiments, a mutation of an amino acid corresponding to amino acid Y164 of Prevotella buccae Cas13b (PbCas13b). In some embodiments, a mutation of an amino acid corresponding to amino acid R285 of Prevotella buccae Cas13b (PbCas13b). In some embodiments, a mutation of an amino acid corresponding to amino acid R287 of Prevotella buccae Cas13b (PbCas13b). In some embodiments, a mutation of an amino acid corresponding to amino acid K292 of Prevotella buccae Cas13b (PbCas13b). In some embodiments, a mutation of an amino acid corresponding to amino acid E296 of Prevotella buccae Cas13b (PbCas13b). In some embodiments, a mutation of an amino acid corresponding to amino acid N297 of Prevotella buccae Cas13b (PbCas13b). In some embodiments, a mutation of an amino acid corresponding to amino acid Q646 of Prevotella buccae Cas13b (PbCas13b). In some embodiments, a mutation of an amino acid corresponding to amino acid N647 of Prevotella buccae Cas13b (PbCas13b). In some embodiments, a mutation of an amino acid corresponding to amino acid R402 of Prevotella buccae Cas13b (PbCas13b). In some embodiments, a mutation of an amino acid corresponding to amino acid K393 of Prevotella buccae Cas13b (PbCas13b). In some embodiments, a mutation of an amino acid corresponding to amino acid N653 of Prevotella buccae Cas13b (PbCas13b). In some embodiments, a mutation of an amino acid corresponding to amino acid N652 of Prevotella buccae Cas13b (PbCas13b). In some embodiments, a mutation of an amino acid corresponding to amino acid R482 of Prevotella buccae Cas13b (PbCas13b). In some embodiments, a mutation of an amino acid corresponding to amino acid N480 of Prevotella buccae Cas13b (PbCas13b). In some embodiments, a mutation of an amino acid corresponding to amino acid D396 of Prevotella buccae Cas13b (PbCas13b). In some embodiments, a mutation of an amino acid corresponding to amino acid E397 of Prevotella buccae Cas13b (PbCas13b). In some embodiments, a mutation of an amino acid corresponding to amino acid D398 of Prevotella buccae Cas13b (PbCas13b). In some embodiments, a mutation of an amino acid corresponding to amino acid E399 of Prevotella buccae Cas13b (PbCas13b). In some embodiments, a mutation of an amino acid corresponding to amino acid K294 of Prevotella buccae Cas13b (PbCas13b). In some embodiments, a mutation of an amino acid corresponding to amino acid E400 of Prevotella buccae Cas13b (PbCas13b). In some embodiments, a mutation of an amino acid corresponding to amino acid R56 of Prevotella buccae Cas13b (PbCas13b). In some embodiments, a mutation of an amino acid corresponding to amino acid N157 of Prevotella buccae Cas13b (PbCas13b). In some embodiments, a mutation of an amino acid corresponding to amino acid H161 of Prevotella buccae Cas13b (PbCas13b). In some embodiments, a mutation of an amino acid corresponding to amino acid H452 of Prevotella buccae Cas13b (PbCas13b). In some embodiments, a mutation of an amino acid corresponding to amino acid N455 of Prevotella buccae Cas13b (PbCas13b). In some embodiments, a mutation of an amino acid corresponding to amino acid K484 of Prevotella buccae Cas13b (PbCas13b). In some embodiments, a mutation of an amino acid corresponding to amino acid N486 of Prevotella buccae Cas13b (PbCas13b). In some embodiments, a mutation of an amino acid corresponding to amino acid G566 of Prevotella buccae Cas13b (PbCas13b). In some embodiments, a mutation of an amino acid corresponding to amino acid H567 of Prevotella buccae Cas13b (PbCas13b). In some embodiments, a mutation of an amino acid corresponding to amino acid A656 of Prevotella buccae Cas13b (PbCas13b). In some embodiments, a mutation of an amino acid corresponding to amino acid V795 of Prevotella buccae Cas13b (PbCas13b). In some embodiments, a mutation of an amino acid corresponding to amino acid A796 of Prevotella buccae Cas13b (PbCas13b). In some embodiments, a mutation of an amino acid corresponding to amino acid W842 of Prevotella buccae Cas13b (PbCas13b). In some embodiments, a mutation of an amino acid corresponding to amino acid K871 of Prevotella buccae Cas13b (PbCas13b). In some embodiments, a mutation of an amino acid corresponding to amino acid E873 of Prevotella buccae Cas13b (PbCas13b). In some embodiments, a mutation of an amino acid corresponding to amino acid R874 of Prevotella buccae Cas13b (PbCas13b). In some embodiments, a mutation of an amino acid corresponding to amino acid R1068 of Prevotella buccae Cas13b (PbCas13b). In some embodiments, a mutation of an amino acid corresponding to amino acid N1069 of Prevotella buccae Cas13b (PbCas13b). In some embodiments, a mutation of an amino acid corresponding to amino acid H1073 of Prevotella buccae Cas13b (PbCas13b).

[0033] In some embodiments, one or more mutation of an amino acid corresponding to the following amino acids of Leptotrichia shahii Cas13a (LshCas13a): R597, N598, H602, R1278, N1279, or H1283. In some embodiments, one or more mutation of an amino acid corresponding to the following amino acids of Leptotrichia shahii Cas13a (LshCas13a): R597, N598, H602, R1278, N1279, or H1283. In some embodiments, in a HEPN domain one or more mutation of an amino acid corresponding to the following amino acids in a HEPN domain of Leptotrichia shahii Cas13a (LshCas13a): R597, N598, H602, R1278, N1279, or H1283. In some embodiments, one or more mutation of an amino acid corresponding to the following amino acids of Leptotrichia shahii Cas13a (LshCas13a): R597, N598, or H602. In some embodiments, in HEPN domain 1 one or more mutation of an amino acid corresponding to the following amino acids in HEPN domain 1 of Leptotrichia shahii Cas13a (LshCas13a): R597, N598, or H602. In some embodiments, one or more mutation of an amino acid corresponding to the following amino acids of Leptotrichia shahii Cas13a (LshCas13a): R1278, N1279, or H1283. In some embodiments, in HEPN domain 2 one or more mutation of an amino acid corresponding to the following amino acids in HEPN domain 2 of Leptotrichia shahii Cas13a (LshCas13a): R1278, N1279, or H1283. In some embodiments, one or more mutation of an amino acid corresponding to the following amino acids of Porphyromonas gulae Cas13b (PguCas13b): R146, H151, R1116, or H1121. In some embodiments, one or more mutation of an amino acid corresponding to the following amino acids of Porphyromonas gulae Cas13b (PguCas13b): R146, H151, R1116, or H1121. In some embodiments, in a HEPN domain one or more mutation of an amino acid corresponding to the following amino acids in a HEPN domain of Porphyromonas gulae Cas13b (PguCas13b): R146, H151, R1116, or H1121. In some embodiments, one or more mutation of an amino acid corresponding to the following amino acids of Porphyromonas gulae Cas13b (PguCas13b): R146 or H151. In some embodiments, in HEPN domain 1 one or more mutation of an amino acid corresponding to the following amino acids in HEPN domain 1 of Porphyromonas gulae Cas13b (PguCas13b): R146 or H151. In some embodiments, one or more mutation of an amino acid corresponding to the following amino acids of Porphyromonas gulae Cas13b (PguCas13b): R1116 or H1121. In some embodiments, in HEPN domain 2 one or more mutation of an amino acid corresponding to the following amino acids in HEPN domain 2 of Porphyromonas gulae Cas13b (PguCas13b): R1116 or H1121. In some embodiments, one or more mutation of an amino acid corresponding to the following amino acids of Prevotella sp. P5-125 Cas13b (PspCas13b): H133 or H1058. In some embodiments, one or more mutation of an amino acid corresponding to the following amino acids of Prevotella sp. P5-125 Cas13b (PspCas13b): H133 or H1058. In some embodiments, in a HEPN domain one or more mutation of an amino acid corresponding to the following amino acids in a HEPN domain of Prevotella sp. P5-125 Cas13b (PspCas13b): H133 or H1058. In some embodiments, a mutation of an amino acid corresponding to amino acid H133 of Prevotella sp. P5-125 Cas13b (PspCas13b). In some embodiments, in HEPN domain 1 a mutation of an amino acid corresponding to amino acid H133 in HEPN domain 1 of Prevotella sp. P5-125 Cas13b (PspCas13b). In some embodiments, a mutation of an amino acid corresponding to amino acid H1058 of Prevotella sp. P5-125 Cas13b (PspCas13b). In some embodiments, in HEPN domain 2 a mutation of an amino acid corresponding to the amino acid H1058 in HEPN domain 2 of Prevotella sp. P5-125 Cas13b (PspCas13b).

[0034] In some embodiments, the amino acid is mutated to A, P, or V, preferably A. In some embodiments, said amino acid is mutated to a hydrophobic amino acid. In some embodiments, said amino acid is mutated to an aromatic amino acid. In some embodiments, said amino acid is mutated to a charged amino acid. In some embodiments, said amino acid is mutated to a positively charged amino acid. In some embodiments, said amino acid is mutated to a negatively charged amino acid. In some embodiments, said amino acid is mutated to a polar amino acid. In some embodiments, said amino acid is mutated to an aliphatic amino acid. In some embodiments, the engineered CRISPR-Cas protein further comprises a functional heterologous domain.

[0035] In some embodiments, the Cas13 protein is from a species of the genus Alistipes, Anaerosalibacter, Bacteroides, Bacteroidetes, Bergeyella, Blautia, Butyrivibrio, Capnocytophaga, Carnobacterium, Chloroflexus, Chryseobacterium, Clostridium, Demequina, Eubacteriaceae, Eubacterium, Flavobacterium, Fusobacterium, Herbinix, Insolitispirillum, Lachnospiraceae, Leptotrichia, Listeria, Myroides, Paludibacter, Phaeodactylibacter, Porphyromonadaceae, Porphyromonas, Prevotella, Pseudobutyrivibrio, Psychroflexus, Reichenbachiella, Rhodobacter, Riemerella, Sinomicrobium, Thalassospira, Ruminococcus; preferably Leptotrichia shahii, Listeria seeligeri, Lachnospiraceae bacterium (such as Lb MA2020, Lb NK4A179, Lb NK4A144), Clostridium aminophilum (such as Ca DSM 10710), Carnobacterium gallinarum (such as Cg DSM 4847), Paludibacter propionicigenes (such as Pp WB4), Listeria weihenstephanensis (such as Lw FSL R9-0317), Listeriaceae bacterium (such as Lb FSL M6-0635), Leptotrichia wadei (such as Lw F0279), Rhodobacter capsulatus (such as Rc SB 1003, Rc R121, Rc DE442), Leptotrichia buccalis (such as Lb C-1013-b), Herbinix hemicellulosilytica, Eubacteriaceae bacterium (such as Eb CHKCI004), Blautia. sp Marseille-P2398, Leptotrichia sp. oral taxon 879 str. F0557, Chloroflexus aggregans, Demequina aurantiaca, Thalassospira sp. TSL5-1, Pseudobutyrivibrio sp. OR37, Butyrivibrio sp. YAB3001, Leptotrichia sp. Marseille-P3007, Bacteroides ihuae, Porphyromonadaceae bacterium (such as Pb KH3CP3RA), Listeria riparia, Insolitispirillum peregrinum, Alistipes sp. ZOR0009, Bacteroides pyogenes (such as Bp F0041), Bacteroidetes bacterium (such as Bb GWA2_31_9), Bergeyella zoohelcum (such as Bz ATCC 43767), Capnocytophaga canimorsus, Capnocytophaga cynodegmi, Chryseobacterium carnipullorum, Chryseobacterium jejuense, Chryseobacterium ureilyticum, Flavobacterium branchiophilum, Flavobacterium columnare, Flavobacterium sp. 316, Myroides odoratimimus (such as Mo CCUG 10230, Mo CCUG 12901, Mo CCUG 3837), Paludibacter propionicigenes, Phaeodactylibacter xiamenensis, Porphyromonas gingivalis (such as Pg F0185, Pg F0568, Pg JCVI SC001, Pg W4087, Porphyromonas gulae, Porphyromonas sp. COT-052 OH4946, Prevotella aurantiaca, Prevotella buccae (such as Pb ATCC 33574), Prevotella falsenii, Prevotella intermedia (such as Pi 17, Pi ZT), Prevotella pallens (such as Pp ATCC 700821), Prevotella pleuritidis, Prevotella saccharolytica (such as Ps F0055), Prevotella sp. MA2016, Prevotella sp. MSX73, Prevotella sp. P4-76, Prevotella sp. P5-119, Prevotella sp. P5-125, Prevotella sp. P5-60, Psychroflexus torquis, Reichenbachiella agariperforans, Riemerella anatipestifer, Sinomicrobium oceani, Fusobacterium necrophorum (such as Fn subsp. funduliforme ATCC 51357, Fn DJ-2, Fn BFTR-1, Fn subsp. funduliforme), Fusobacterium perfoetens (such as Fp ATCC 29250), Fusobacterium ulcerans (such as Fu ATCC 49185), Anaerosalibacter sp. ND1, Eubacterium siraeum, Ruminococcus flavefaciens (such as Rfx XPD3002), or Ruminococcus albus.

[0036] In some embodiments, the Cas13 protein is a Cas13a protein.

[0037] In some embodiments, the Cas13a protein is from a species of the genus Bacteroides, Blautia, Butyrivibrio, Carnobacterium, Chloroflexus, Clostridium, Demequina, Eubacterium, Herbinix, Insolitispirillum, Lachnospiraceae, Leptotrichia, Listeria, Paludibacter, Porphyromonadaceae, Pseudobutyrivibrio, Rhodobacter, or Thalassospira; preferably Leptotrichia shahii, Listeria seeligeri, Lachnospiraceae bacterium (such as Lb MA2020, Lb NK4A179, Lb NK4A144), Clostridium aminophilum (such as Ca DSM 10710), Carnobacterium gallinarum (such as Cg DSM 4847), Paludibacter propionicigenes (such as Pp WB4), Listeria weihenstephanensis (such as Lw FSL R9-0317), Listeriaceae bacterium (such as Lb FSL M6-0635), Leptotrichia wadei (such as Lw F0279), Rhodobacter capsulatus (such as Rc SB 1003, Rc R121, Rc DE442), Leptotrichia buccalis (such as Lb C-1013-b), Herbinix hemicellulosilytica, Eubacteriaceae bacterium (such as Eb CHKCI004), Blautia. sp Marseille-P2398, Leptotrichia sp. oral taxon 879 str. F0557, Chloroflexus aggregans, Demequina aurantiaca, Thalassospira sp. TSL5-1, Pseudobutyrivibrio sp. OR37, Butyrivibrio sp. YAB3001, Leptotrichia sp. Marseille-P3007, Bacteroides ihuae, Porphyromonadaceae bacterium (such as Pb KH3CP3RA), Listeria riparia, or Insolitispirillum peregrinum.

[0038] In some embodiments, the Cas13 protein is a Cas13b protein.

[0039] In some embodiments, the Cas13b protein is from a species of the genus Alistipes, Bacteroides, Bacteroidetes, Bergeyella, Capnocytophaga, Chryseobacterium, Flavobacterium, Myroides, Paludibacter, Phaeodactylibacter, Porphyromonas, Prevotella, Psychroflexus, Reichenbachiella, Riemerella, or Sinomicrobium; preferably Alistipes sp. ZOR0009, Bacteroides pyogenes (such as Bp F0041), Bacteroidetes bacterium (such as Bb GWA2_31_9), Bergeyella zoohelcum (such as Bz ATCC 43767), Capnocytophaga canimorsus, Capnocytophaga cynodegmi, Chryseobacterium carnipullorum, Chryseobacterium jejuense, Chryseobacterium ureilyticum, Flavobacterium branchiophilum, Flavobacterium columnare, Flavobacterium sp. 316, Myroides odoratimimus (such as Mo CCUG 10230, Mo CCUG 12901, Mo CCUG 3837), Paludibacter propionicigenes, Phaeodactylibacter xiamenensis, Porphyromonas gingivalis (such as Pg F0185, Pg F0568, Pg JCVI SC001, Pg W4087, Porphyromonas gulae, Porphyromonas sp. COT-052 OH4946, Prevotella aurantiaca, Prevotella buccae (such as Pb ATCC 33574), Prevotella falsenii, Prevotella intermedia (such as Pi 17, Pi ZT), Prevotella pallens (such as Pp ATCC 700821), Prevotella pleuritidis, Prevotella saccharolytica (such as Ps F0055), Prevotella sp. MA2016, Prevotella sp. MSX73, Prevotella sp. P4-76, Prevotella sp. P5-119, Prevotella sp. P5-125, Prevotella sp. P5-60, Psychroflexus torquis, Reichenbachiella agariperforans, Riemerella anatipestifer, or Sinomicrobium oceani.

[0040] In some embodiments, the Cas13 protein is a Cas13c protein.

[0041] In some embodiments, the Cas13c protein is from a species of the genus Fusobacterium or Anaerosalibacter; preferably Fusobacterium necrophorum (such as Fn subsp. funduliforme ATCC 51357, Fn DJ-2, Fn BFTR-1, Fn subsp. funduliforme), Fusobacterium perfoetens (such as Fp ATCC 29250), Fusobacterium ulcerans (such as Fu ATCC 49185), or Anaerosalibacter sp. ND1.

[0042] In some embodiments, the Cas13 protein is a Cas13d protein.

[0043] In some embodiments, the Cas13d protein is from a species of the genus Eubacterium or Ruminococcus, preferably Eubacterium siraeum, Ruminococcus flavefaciens (such as Rfx XPD3002), or Ruminococcus albus.

[0044] In some embodiments, the catalytic activity of the engineered CRISPR-Cas protein is increased as compared to a corresponding wildtype CRISPR-Cas protein. In some embodiments, the catalytic activity of the engineered CRISPR-Cas protein is decreased as compared to a corresponding wildtype CRISPR-Cas protein. In some embodiments, the gRNA binding of the engineered CRISPR-Cas protein is increased as compared to a corresponding wildtype CRISPR-Cas protein. In some embodiments, the gRNA binding of the engineered CRISPR-Cas protein is decreased as compared to a corresponding wildtype CRISPR-Cas protein. In some embodiments, the specificity of the CRISPR-Cas protein is increased as compared to a corresponding wildtype CRISPR-Cas protein. In some embodiments, the specificity of the CRISPR-Cas protein is decreased as compared to a corresponding wildtype CRISPR-Cas protein. In some embodiments, the stability of the CRISPR-Cas protein is increased as compared to a corresponding wildtype CRISPR-Cas protein. In some embodiments, the stability of the CRISPR-Cas protein is decreased as compared to a corresponding wildtype CRISPR-Cas protein. In some embodiments, the engineered CRISPR-Cas protein further comprises one or more mutations which inactivate catalytic activity. In some embodiments, the off-target binding of the CRISPR-Cas protein is increased as compared to a corresponding wildtype CRISPR-Cas protein. In some embodiments, the off-target binding of the CRISPR-Cas protein is decreased as compared to a corresponding wildtype CRISPR-Cas protein. In some embodiments, the target binding of the CRISPR-Cas protein is increased as compared to a corresponding wildtype CRISPR-Cas protein. In some embodiments, the target binding of the CRISPR-Cas protein is decreased as compared to a corresponding wildtype CRISPR-Cas protein. In some embodiments, the engineered CRISPR-Cas protein has a higher protease activity or polynucleotide-binding capability compared with a corresponding wildtype CRISPR-Cas protein. In some embodiments, PFS recognition is altered as compared to a corresponding wildtype CRISPR-Cas protein. In some embodiments, the engineered CRISPR-Cas protein further comprises a functional heterologous domain. In some embodiments, the engineered CRISPR-Cas protein further comprises an NLS.

[0045] In another aspect, the present disclosure provides one or more HEPN domains and is less than 1000 amino acids in length. In some embodiments, the protein is less than 950, less than 900, less than 850, less than 800, less, or than 750 amino acids in size. In some embodiments, the HEPN domain comprises RxxxxH motif sequence. In some embodiments, the RxxxxH motif comprises a R[N/H/K]X₁X₂X₃H sequence. In some embodiments, X₁ is R, S, D, E, Q, N, G, or Y, X₂ is independently I, S, T, V, or L, and X₃ is independently L, F, N, Y, V, I, S, D, E, or A. In some embodiments, the CRISPR-Cas protein is a Type VI CRISPR Cas protein. In some embodiments, the Type VI CRISPR Cas protein is a Cas13a, a Cas13b, a Cas13c, or a Cas13d. In some embodiments, the CRISPR-Cas protein is associated with a functional domain. In some embodiments, the CRISPR-Cas protein comprises one or more mutations equivalent to mutations described herein. In some embodiments, the CRISPR-Cas protein comprises one or more mutations in the helical domain. In some embodiments, the CRISPR-Cas protein is in a dead form or has nickase activity.

[0046] In another aspect, the present disclosure provides a polynucleic acid encoding the engineered CRISPR-Cas protein herein. In some embodiments, the polynucleic acid is codon optimized.

[0047] In another aspect, the present disclosure provides a CRISPR-Cas system comprising the engineered CRISPR-Cas protein herein or the polynucleotide herein, and a nucleotide component capable of forming a complex with the engineered CRISPR-Cas protein and able to hybridize with a target nucleic acid sequence and direct sequence-specific binding of said complex to the target nucleic acid sequence.

[0048] In another aspect, the present disclosure provides a vector system comprising one or more vectors, the one or more vectors comprising one or more polynucleotide molecules encoding components of the engineered CRISPR-Cas protein.

[0049] In another aspect, the present disclosure provides a method of modifying a target nucleic acid comprising: introducing in a cell or organism that comprises the target nucleic acid, the engineered CRISPR-Cas protein, the polynucleotide, the CRISPR-Cas system, or the vector or vector system described herein, such that the engineered CRISPR-Cas protein modifies the target nucleic acid in the cell or organism.

[0050] In some embodiments, the engineered CRISPR-Cas system is introduced via delivery by liposomes, nanoparticles, exosomes, microvesicles, nucleic acid nanoassemblies, a gene gun, an implantable device, or the vector system herein. In some embodiments, the engineered CRISPR-cas protein is associated with one or more functional domains. In some embodiments, the target nucleic acid comprises a genomic locus, and the engineered CRISPR-Cas protein modifies gene product encoded at the genomic locus or expression of the gene product. In some embodiments, the target nucleic acid is DNA or RNA and wherein one or more nucleotides in the target nucleic acid are base edited. In some embodiments, the target nucleic acid is DNA or RNA and wherein the target nucleic acid is cleaved. In some embodiments, the engineered CRISPR-Cas protein further cleaves non-target nucleic acid. In some embodiments, the method further comprises visualizing activity and, optionally, using a detectable label. In some embodiments, the method further comprises detecting binding of one or more components of the CRISPR-Cas system to the target nucleic acid. In some embodiments, said cell or organisms is a eukaryotic cell or organism. In some embodiments, said cell or organisms is an animal cell or organism. In some embodiments, said cell or organisms is a plant cell or organism.

[0051] In another aspect, the present disclosure provides method for detecting a target nucleic acid in a sample comprising: contacting a sample with: an engineered CRISPR-Cas protein herein; at least one guide polynucleotide comprising a guide sequence capable of binding to the target nucleic acid and designed to form a complex with the engineered CRISPR-Cas; and a RNA-based masking construct comprising a non-target sequence; wherein the engineered CRISPR-Cas protein exhibits collateral RNase activity and cleaves the non-target sequence of the detection construct; and detecting a signal from cleavage of the non-target sequence, thereby detecting the target nucleic acid in the sample.

[0052] In some embodiments, the method further comprises contacting the sample with reagents for amplifying the target nucleic acid. In some embodiments, the reagents for amplifying comprises isothermal amplification reaction reagents. In some embodiments, the isothermal amplification reagents comprise nucleic-acid sequence-based amplification, recombinase polymerase amplification, loop-mediated isothermal amplification, strand displacement amplification, helicase-dependent amplification, or nicking enzyme amplification reagents. In some embodiments, the target nucleic acid is DNA molecule and the method further comprises contacting the target DNA molecule with a primer comprising an RNA polymerase site and RNA polymerase. In some embodiments, the masking construct: suppresses generation of a detectable positive signal until the masking construct cleaved or deactivated, or masks a detectable positive signal or generates a detectable negative signal until the masking construct cleaved or deactivated.

[0053] In some embodiments, the masking construct comprises: a. a silencing RNA that suppresses generation of a gene product encoded by a reporting construct, wherein the gene product generates the detectable positive signal when expressed; b. a ribozyme that generates the negative detectable signal, and wherein the positive detectable signal is generated when the ribozyme is deactivated; or c. a ribozyme that converts a substrate to a first color and wherein the substrate converts to a second color when the ribozyme is deactivated; d. an aptamer and/or comprises a polynucleotide-tethered inhibitor; e. a polynucleotide to which a detectable ligand and a masking component are attached; f. a nanoparticle held in aggregate by bridge molecules, wherein at least a portion of the bridge molecules comprises a polynucleotide, and wherein the solution undergoes a color shift when the nanoparticle is disbursed in solution; g. a quantum dot or fluorophore linked to one or more quencher molecules by a linking molecule, wherein at least a portion of the linking molecule comprises a polynucleotide; h. a polynucleotide in complex with an intercalating agent, wherein the intercalating agent changes absorbance upon cleavage of the polynucleotide; or l. two fluorophores tethered by a polynucleotide that undergo a shift in fluorescence when released from the polynucleotide.

[0054] In some embodiments, the aptamer a. comprises a polynucleotide-tethered inhibitor that sequesters an enzyme, wherein the enzyme generates a detectable signal upon release from the aptamer or polynucleotidetethered inhibitor by acting upon a substrate; or b. is an inhibitory aptamer that inhibits an enzyme and prevents the enzyme from catalyzing generation of a detectable signal from a substrate or wherein the polynucleotidetethered inhibitor inhibits an enzyme and prevents the enzyme from catalyzing generation of a detectable signal from a substrate; or c. sequesters a pair of agents that when released from the aptamers combine to generate a detectable signal. In some embodiments, the nanoparticle is a colloidal metal. In some embodiments, the at least one guide polynucleotide comprises a mismatch. In some embodiments, the mismatch is up- or downstream of a single nucleotide variation on the one or more guide sequences.

[0055] In another aspect, the present disclosure provides a cell or organism comprising the engineered CRISPR-Cas protein herein, the polynucleic acid herein, the CRISPR-Cas system, or the vector or vector system herein.

[0056] In another aspect, the present disclosure provides an engineered adenosine deaminase comprising one or more mutations, wherein the engineered adenosine deaminase has cytidine deaminase activity.

[0057] In some embodiments, the engineered adenosine deaminase has adenosine deaminase activity. In some embodiments, the engineered adenosine deaminase is a portion of a fusion protein. In some embodiments, the fusion protein comprises a functional domain. In some embodiments, the functional domain is capable of directing the engineered adenosine deaminase to bind to a target nucleic acid. In some embodiments, the functional domain is a CRISPR-Cas protein herein. In some embodiments, the CRISPR-Cas protein is a dead form CRISPR-Cas protein or CRISPR-Cas nickase protein. In some embodiments, the one or more mutations comprises: E488Q, V351G, S486A, T375S, S370C, P462A, N597I, L332I, I398V, K350I, M383L, D619G, S582T, V440I, S495N, K418E, S661T based on amino acid sequence positions of hADAR2-D, and corresponding mutations in a homologous ADAR protein. In some embodiments, the one or more mutations comprises: E488Q, V351G, S486A, T375S, S370C, P462A, N597I, L332I, I398V, K350I, M383L, D619G, S582T, V440I, S495N, K418E, and S661T based on amino acid sequence positions of hADAR2-D, and corresponding mutations in a homologous ADAR protein.

[0058] In another aspect, the present disclosure provides a polynucleotide encoding the engineered adenosine deaminase, or a catalytic domain thereof. In another aspect, the present disclosure provides comprising the polynucleotide.

[0059] In another aspect, the present disclosure provides a pharmaceutical composition comprising the engineered adenosine deaminase or a catalytic domain thereof formulated for delivery by liposomes, nanoparticles, exosomes, microvesicles, nucleic acid nanoassemblies, a gene gun, or an implantable device.

[0060] In another aspect, the present disclosure an engineered cell expressing the engineered adenosine deaminase or a catalytic domain thereof. In some embodiments, the cell transiently expresses the engineered adenosine deaminase or the catalytic domain thereof. In some embodiments, the cell non-transiently expresses the engineered adenosine deaminase or the catalytic domain thereof.

[0061] An another aspect, the present disclosure provides an engineered, non-naturally occurring system for modifying nucleotides in a target nucleic acid, comprising a) a dead CRISPR-Cas or CRISPR-Cas nickase protein, or a nucleotide sequence encoding said dead Cas or Cas nickase protein; b) a guide molecule comprising a guide sequence that hybridizes to a target sequence and designed to form a complex with the dead CRISPR-Cas or CRISPR-Cas nickase protein; and c) a nucleotide deaminase protein or catalytic domain thereof, or a nucleotide sequence encoding said nucleotide deaminase protein or catalytic domain thereof, wherein said nucleotide deaminase protein or catalytic domain thereof is covalently or non-covalently linked to said dead CRISPR-Cas or CRISPR-Cas nickase protein or said guide molecule is adapted to link thereof after delivery.

[0062] In some embodiments, said adenosine deaminase protein or catalytic domain thereof comprises one or more of the mutations: E488Q, V351G, S486A, T375S, S370C, P462A, N597I, L332I, I398V, K350I, M383L, D619G, S582T, V440I, S495N, K418E, S661T based on amino acid sequence positions of hADAR2-D, and corresponding mutations in a homologous ADAR protein. In some embodiments, said adenosine deaminase protein or catalytic domain thereof comprises mutations: E488Q, V351G, S486A, T375S, S370C, P462A, N597I, L332I, I398V, K350I, M383L, D619G, S582T, V440I, S495N, K418E, and S661T based on amino acid sequence positions of hADAR2-D, and corresponding mutations in a homologous ADAR protein.

[0063] In some embodiments, the CRISPR-Cas protein is Cas9, Cas12, Cas13, Cas 14, CasX, CasY. In some embodiments, the CRISPR-Cas protein is Cas13b. In some embodiments, the CRISPR-Cas protein is Cas13b-t1, Cas13b-t2, or Cas13b-t3. In some embodiments, he CRISPR-Cas is an engineered CRISPR-Cas protein.

[0064] In another aspect, the present disclosure provides a method for modifying nucleotide in a target nucleic acid, comprising: delivering to said target nucleic acid the engineered adenosine deaminase, or the system, wherein the deaminase deaminates a nucleotide at one or more target loci on the target nucleic acid.

[0065] In some embodiments, said nucleotide deaminase protein or catalytic domain thereof has been modified to increase activity against a DNA-RNA heteroduplex. In some embodiments, said nucleotide deaminase protein or catalytic domain thereof has been modified to reduce off-target effects. In some embodiments, the target nucleic acid is within a cell. In some embodiments, said cell is a eukaryotic cell. In some embodiments, said cell is a non-human animal cell. In some embodiments, said cell is a human cell. In some embodiments, said cell is a plant cell. In some embodiments, said target nucleic acid is within an animal. In some embodiments, said target nucleic acid is within a plant. In some embodiments, said target nucleic acid is comprised in a DNA molecule in vitro. In some embodiments, the engineered adenosine deaminase, or one or more components of the system are delivered to the cell as a ribonucleoprotein complex. In some embodiments, the engineered adenosine deaminase, or one or more components of the system are delivered via one or more particles, one or more vesicles, or one or more viral vectors. In some embodiments, said one or more particles comprise a lipid, a sugar, a metal or a protein. In some embodiments, said one or more particles comprise lipid nanoparticles. In some embodiments, said one or more vesicles comprise exosomes or liposomes. In some embodiments, said one or more viral vectors comprise one or more adenoviral vectors, one or more lentiviral vectors, or one or more adeno-associated viral vectors. In some embodiments, said method modifies a cell, a cell line or an organism by manipulation of one or more target sequences at genomic loci of interest. In some embodiments, said deamination of said nucleotide at said target locus of interest remedies a disease caused by a G→A or C→T point mutation or a pathogenic SNP. In some embodiments, said disease is selected from cancer, haemophilia, beta-thalassemia, Marfan syndrome and Wiskott-Aldrich syndrome. In some embodiments, said deamination of said nucleotide at said target locus of interest remedies a disease caused by a T→C or A→G point mutation or a pathogenic SNP. In some embodiments, said deamination of said nucleotide at said target locus of interest inactivates a target gene at said target locus. In some embodiments, the engineered adenosine deaminase, or one or more components of the system are delivered by liposomes, nanoparticles, exosomes, microvesicles, nucleic acid nanoassemblies, a gene gun, an implantable device, or the vector system. In some embodiments, modification of the nucleotide modifies gene product encoded at the target locus or expression of the gene product.

[0066] These and other aspects, objects, features, and advantages of the example embodiments will become apparent to those having ordinary skill in the art upon consideration of the following detailed description of illustrated example embodiments.

### BRIEF DESCRIPTION OF THE DRAWINGS

[0067] An understanding of the features and advantages of the present invention will be obtained by reference to the following detailed description that sets forth illustrative embodiments, in which the principles of the invention may be utilized, and the accompanying drawings of which:

[0068] FIGS. 1A-1D. The crystal structure of PbuCas13b-crRNA Binary Complex. (FIG. 1A) Linear domain organization of PbuCas13b. Active site positioning is denoted by asterisks. (FIG. 1B) crRNA hairpin in complex with PbuCas13b. (FIG. 1C) Overall structure of PbuCas13b. Two views are rotated 180 degrees from each other. Domains are colored consistent with the linear domain map. crRNA is colored red. (FIG. 1D) Space-filling model of PbuCas13b, each view rotated 180 degrees from each other.

[0069] FIGS. 2A-2E. PbuCas13b crRNA recognition. (FIG. 2A) Diagram of PbCas13b crRNA (SEQ ID NO:1). Direct repeat residues are colored red, and spacer residues in light blue. (FIG. 2B) Positioning of the 3′ end of the crRNA near K393 and coordinating residues within PbuCas13b. (FIG. 2C) Structure of the crRNA within the PbuCas13b complex. Coloring is consistent with panel (FIG. 2A). (FIG. 2D) Base identity swapping. Upper panel, nuclease activity; lower panel, thermal stability. Hashed fill denotes wild type base identities. (FIG. 2E) Mutagenesis of Lid domain residues that coordinate and process crRNA within PbuCas13b. Upper panel, RNase activity in SHERLOCK reaction; lower panel, crRNA processing. Cleavage bands and expected sizes are indicated by red markers, ladder with sizes are shown on left.

[0070] FIG. 3. Schematic view of the intermolecular contacts between PbuCas13b and crRNA (SEQ ID NO:2).

[0071] FIGS. 4A-4C. PbuCas13b comparison to LshCas13a architecture and active site. (FIG. 4A) Linear comparison of domain organization of PbuCas13b and LshCas13a (pdb 5wtk). crRNAs are shown to the right. (FIG. 4B) Two views of PbuCas13b rotated 90 degrees. Inset is zoomed in on active site residues in the same orientation as in (FIG. 4C). (FIG. 4C) LshCas13a colored consistently with (FIG. 4A). Homologous residues are labeled.

[0072] FIGS. 5A-5H. Site-directed mutagenesis of PbuCas13b; RNA interference in mammalian cell. (FIG. 5A) Effect of all PbuCas13b site-directed mutations on RNA interference in mammalian cells. Strongest interference knockdowns are colored in light blue. (FIG. 5B) PbuCas13b with strong mutations labeled and colored in red. (FIGS. 5C-5H) Mutations separated by region.

[0073] FIGS. 6A-6D. (FIG. 6A) Surface electrostatics of PbuCas13b. (FIG. 6B) Surface electrostatics of PbuCas13b rotated 180 degrees from panel A. (FIG. 6C) Surface electrostatics of PbuCas13b with the Lid domain removed, showing the inner positively charged channel. (FIG. 6D) Surface electrostatics of the putative crRNA processing active site.

[0074] FIG. 7. REPAIR assay of pgCas13b C-terminal truncations.

[0075] FIGS. 8A-8G. (FIG. 8A) PbuCas13b direct repeat structure. (FIG. 8B) Ideal A-form RNA. (FIG. 8C) Diagram of direct repeat base pairing and secondary structure (SEQ ID NO:3). (FIG. 8D) Multiplete one. (FIG. 8E) Multiplete two. (FIG. 8F) Multiplete three. (FIG. 8G) Alignment of PbuCas13b direct repeat sequences (SEQ ID NOs:4-9). Asterix denote conserved nucleotides.

[0076] FIG. 9. Expanded data for cleavage activity of PbuCas13 with mutated crRNA, and thermal stability of crRNA mutants.

[0077] FIGS. 10A-10D. (FIG. 10A) Schematic of crRNA substrate for processing assay (SEQ ID NOs:10-11). (FIG. 10B) Gel showing complementary DR is not processed. (FIG. 10C) crRNA processing by mutants of PbuCas13b. (FIG. 10D) SHERLOCK assay measuring general RNase activity.

[0078] FIGS. 11A-11C. Melting curves of PbuCas13b with substrate RNA and Magnesium ions. (FIG. 11A) The effect of RNA substrate on PbuCas13b thermal stability. (FIG. 11B) The effect of PbuCas13b RNA cleavage and thermal stability. (FIG. 11C) The effect of magnesium on PbuCas13b thermal stability.

[0079] FIG. 12. Limited proteolysis of PbuCas13b with RNA substrate. Limited proteolysis of PbuCas13b. T=Trypsin, C=Chymotrypsin, P=Pepsin

[0080] FIGS. 13A-13C. Cas13b bridge-helix. (FIG. 13A) Cas13b with bridge-helix highlighted in red. RNA is colored in pink. (FIG. 13B) Cas12(Cpf1) with bridge-helix highlighted in cyan. RNA is colored in light blue, DNA dark blue. (FIG. 13C) Manual sequence alignment of bridge helix from PbuCas13b and LbCas12 (SEQ ID NOs:12-13).

[0081] FIG. 14. Cas13b Neighbor-joining tree of all Cas13b family members. Inset, Cas13b subset with PbuCas13b (bolded).

[0082] FIG. 15. Structure based alignment of Cas13b subgroup (SEQ ID NOs:14-22).

[0083] FIG. 16. Structure based alignment of all Cas13bs (SEQ ID NOs:23-37).

[0084] FIGS. 17A-17D. Raw uncropped images of all gels shown in figures. (FIG. 17A) crRNA processing gel1. (FIG. 17B) crRNA processing gel2. (FIG. 17C) crRNA processing gel3. (FIG. 17D) limited proteolysis gel.

[0085] FIG. 18. Grouped topology map of PbuCas13b crystal structure.

[0086] FIG. 19 shows a pymol file that shows a position of the coordinated nucleotide in the active site of Cas13b.

[0087] FIG. 20 shows an exemplary RNA loop extension.

[0088] FIG. 21 shows exemplary fusion points via which a nucleotide deaminase is linked to a Cas13b.

[0089] FIG. 22 shows screening for mutations for RESCUE v9.

[0090] FIG. 23 shows validation of RESCUEv9's effect on T-flip guides.

[0091] FIG. 24 shows validation of RESCUEv9's effect on C-flip guides.

[0092] FIG. 25 shows performance of RESCUEv9 on endogenous targeting.

[0093] FIG. 26 shows screening for mutations for RESCUEv10.

[0094] FIG. 27 shows test results of 30-bp guides for C-flips.

[0095] FIG. 28 shows Gluc/Cluc results from comparison between Cas13b6 and Cas13b12 with RESCUE v1 through v8.

[0096] FIG. 29 shows fraction editing results from comparison between Cas13b6 and Cas13b12 with RESCUE v1 through v8.

[0097] FIG. 30 shows effects on endogenous targeting (T-flips) results from comparison between Cas13b6 and Cas13b12 with RESCUEv8.

[0098] FIG. 31 shows effects of RESCUEs on base converting.

[0099] FIG. 32 shows test results of CCN 3′ motif targeting.

[0100] FIG. 33A shows a schematic of constructs with dCas13b fused with ADAR. FIG. 33B shows test results of the constructs.

[0101] FIG. 34 shows sequencing of the N-terminal tag and linkers.

[0102] FIG. 35 shows quantification of off-targets.

[0103] FIG. 36 shows testing of off-target edits.

[0104] FIG. 37 shows test results of endogenous genes targets with (GGS)2/Q507R.

[0105] FIG. 38 and FIG. 39 show eGFP screening of mutations on (GGS)2/Q507R.

[0106] FIG. 40A shows constructs with Cas13b truncation. FIG. 40B shows test results of the constructs.

[0107] FIG. 41 shows multiplexed on/off-target guides for screening (SEQ ID NOs:38-39).

[0108] FIGS. 42A-42E show validation tests on RESCUEv10. FIG. 42A shows validation of RESCUEv10 (Rounds 50, 52). FIG. 42B shows validation of RESCUEv10 (Rounds 53, 54).

[0109] FIG. 42C shows validation of RESCUEv10 (Rounds 58). FIG. 42D shows validation of RESCUEv10 (Rounds 59). FIG. 42E shows validation of RESCUEv10 (Rounds 61).

[0110] FIG. 43 shows NGS analysis of RESCUEv10.

[0111] FIG. 44 shows identified mutations that improve specificity.

[0112] FIG. 45 shows effects of RESCUE on endogenous targeting (C-flips and T-flips) results.

[0113] FIG. 46 shows targeting β-catenin using RESCUE v6 and v9.

[0114] FIG. 47 shows new β-catenin secreted Gluc/Cluc reporter.

[0115] FIG. 48 shows results of targeting β-catenin by RESCUEv10.

[0116] FIG. 49 shows targeting ApoE4 by RESCUEv10.

[0117] FIG. 50 shows exemplary mutations in PCSK9 that can be generated using RESCUE.

[0118] FIG. 51 shows results from Gluc knockdown in mammalian cells by Cas13b-t1.

[0119] FIG. 52 shows results from Gluc knockdown in mammalian cells by Cas13b-t2.

[0120] FIG. 53 shows results from Gluc knockdown in mammalian cells by Cas13b-t3.

[0121] FIGS. 54A-54C show loci of Cas13b-t1, Cas13b-t2, and Cas13b-t3.

[0122] FIGS. 55A-55C show more details on loci of Cas13b-t1, Cas13b-t2, and Cas13b-t3 (SEQ ID NOs:40-45).

[0123] FIG. 56 shows alignments of Cas13b-t1, Cas13b-t2, and Cas13b-t3 with other Cas13b orthologs (SEQ ID NO:46-64).

[0124] FIG. 57 shows a summary of RESCUE mutations screened.

[0125] FIG. 58 is a graph illustrating results of an experiment in which better beta catenin mutants were selected.

[0126] FIG. 59 shows graphs illustrating results of RESCUE round 12.

[0127] FIG. 60 is a schematic illustrating the beta catenin migration assay.

[0128] FIG. 61 is a graph showing results of a cell migration assay induced by beta catenin.

[0129] FIG. 62 shows graphs illustrating that specificity mutations eliminate A-I off-targets.

[0130] FIG. 63 shows graphs illustrating that targeting Stat1/3 phosphorylation sites reduces signaling.

[0131] FIG. 64 shows graphs illustrating that targeting Stat1/3 phosphorylation sites reduces signaling (STAT1 non-treatment (left) and STAT1 IFNγ treatment (right)).

[0132] FIG. 65 shows graphs illustrating that targeting Stat1/3 phosphorylation sites reduces signaling, with FIG. 65A showing results for STAT3 IL6 activation and FIG. 65B showing results for STAT3 no treatment.

[0133] FIG. 66 show graphs illustrating results of RESCUE round 12.

[0134] FIG. 67 show graphs illustrating results from a potential RESCUE round 13.

[0135] FIG. 68 is a graph showing results of a cell migration assay induced by beta catenin.

[0136] FIG. 69 shows a graph illustrating results of comparison of dead and live tiny orthologs for Gluc knock down.

[0137] FIG. 70 shows a graph illustrating of testing function of Cas13b-t1.

[0138] FIG. 71 shows a graph illustrating of testing function of Cas13b-t3.

[0139] FIG. 72 shows a graph illustrating the guides, non-targeting comparison.

[0140] FIGS. 73A-73G: Directed evolution of a ADAR2 deaminase domain for cytidine deamination. (FIG. 73A) Schematic of the directed evolution approach, involving rational mutagenesis, yeast screening, and mammalian cell validation of activity. (FIG. 73B) Activity of RESCUE versions 0-16 on a cytidine flanked by a 5′ U and a C′ G on a Gluc transcript. Left: Luciferase reporter activity is reported for RESCUEv0-v16. Right: Percent editing levels of RESCUEv0-v16 is reported. (FIG. 73C) Heatmap depicting the percent editing levels of RESCUEv0-v16 on cytidines flanked by varying bases on the Gluc transcript. (FIG. 73D) Percent editing of RESCUEv0-v16 on a cytidine flanked by a 5′ U and a C′ G on a Gluc transcript at varying levels of the RESCUE plasmid transfected. (FIG. 73E) Editing activity of RESCUEv16 and RESCUEv8 on all possible 16 cytidine flanking bases motifs on the Gluc transcript. Guide designs with either a T-flip or a C-flip across from the target cytidine are used. (FIG. 73F) Cytidine deamination by RESCUEv16 is compared to editing with the guide RNA along with either ADAR2dd, full length ADAR2, or no protein. (FIG. 73G) A zoomed in crystal structure view of the mutants at the catalytic deamination site with the RNA with the flipped out base also shown.

[0141] FIGS. 74A-74G: C to U editing by RESCUE on endogenous and disease relevant targets. (FIG. 74A) Editing efficiency of RESCUEv16 on a panel of endogenous genes covering multiple motifs. (FIG. 74B) Heatmap depicting editing efficiency of RESCUE versions v0-v16 on a panel of three endogenous genes. (FIG. 74C) Editing efficiency of RESCUEv16 on a set of synthetic versions of relevant T>C disease mutations. (FIG. 74D) Schematic of multiplexed C to U and A to I editing with pre-crRNA guide arrays. (FIG. 74E) Simultaneous C to U and A to I editing on beta catenin transcripts. (FIG. 74F) Schematic of rational prevention of off-target activity at neighboring adenosine sites via introduction of disfavored base flips (SEQ ID NO:65-66). (FIG. 74G) Percent editing at on-target C and off-target A sites for Gaussia luciferase (left) and KRAS (right) using rational introduction of disfavored baseflips.

[0142] FIGS. 75A-75F: Transcriptome-wide specificity of RESCUEv16. (FIG. 75A) On-target C to U editing and summary of C to U and A to I transcriptome-wide off targets of RESCUE v16 and B6-REPAIRv1, B12-REPAIRv1, and B12-REPAIRv2. (FIG. 75B) Manhattan plot of RESCUEv16 A to I and C to U off targets. The on-target C to U edit is highlighted in orange. (FIG. 75C) Schematic of the interactions between ADAR2dd residues and double stranded RNA substrate with residues used in a mutagenesis screen for improving specificity highlighted red (SEQ ID NO:67-68). (FIG. 75D) Luciferase values for C to U activity with a targeting guide (y-axis) and A to I activity with a non-targeting guide (x-axis) shown for RESCUEv16 and 95 RESCUEv16 mutants. Mutants highlighted in blue have efficient targeted C to U activity, but have lost their residual A to I activity, indicating an improvement in A to I specificity. (FIG. 75E) On-target C to U editing and summary of C to U and A to I transcriptome-wide off targets of RESCUE v16 and top specificity mutants. (FIG. 75F) Manhattan plot of RESCUEv16S (+S375A) A to I and C to U off targets (SEQ ID NO:65-66). The on-target C to U edit is highlighted in orange.

[0143] FIGS. 76A-76H: Phenotypic outcomes directed by C to U RNA editing for cell growth and signaling. (FIG. 76A) Schematic of RNA targeting against phosphorylated residues of STAT3 to alter associated signaling pathways (SEQ ID NO:69-74). (FIG. 76B) Percent editing at relevant phosphorylated residues in STAT3 (left) and STAT1 (right) by RESCUEv16. (FIG. 76C) Inhibition of STAT3 (left) and STAT1 (right) signaling by RNA editing as measured by STAT-driven luciferase expression. (FIG. 76D) Schematic of RNA targeting against phosphorylated residues of CTNNB1 to promote stabilization (SEQ ID NO:75-77). (FIG. 76E) Schematic of beta catenin activation via editing of phosphorylated residues by RESCUE, resulting in increased cellular growth. (FIG. 76F) Percent editing at relevant phosphorylated residues in CTNNB1 by RESCUEv16. (FIG. 76G) Activation of CTNNB1 signaling by RNA editing as measured by CTNNB1-driven (TCF/LEF) luciferase expression. (FIG. 76H) Quantitation of cellular growth due to activation of CTNNB1 signaling by RNA editing.

[0144] FIGS. 77A-77B: Screening of inactivating Gluc mutations for generating a cytosine deamination luciferase reporter. (FIG. 77A) Luciferase activity of a panel of various Gluc mutants shown to previously have some effect on luciferase activity [cite Gluc paper]. Values represent mean+/−S.E.M (n=3). (FIG. 77B) Luciferase activity of a panel of leucine to proline Gluc mutants. Leucine to proline mutant reporters were focused on because they generate a CCN motif site for cytidine deamination (center C is deaminated). This allows for assaying the effect of all four CCN motifs on RESCUE deamination activity. Values represent mean+/−S.E.M (n=3).

[0145] FIG. 78: Cytidine deamination activity of RESCUEv0-v16 on CCG, ACG, GCG, CCA, and CCU sites in Gluc. Values represent mean+/−S.E.M (n=3).

[0146] FIGS. 79A-79B: Cytidine deamination activity of varying amounts of RESCUEv0-16. (FIG. 78A) Dose response of RESCUEv0-v16 activity as measured by restoration of luciferase activity on a UCG site in the Gluc transcript. Values represent mean of three replicates. (FIG. 78B) Dose response of RESCUEv0-v16 activity as measured by restoration of luciferase activity on the T41I site in the CTNNB1 transcript. Values represent mean of three replicates.

[0147] FIG. 80: Percent editing of a UCG site in the Gluc transcript by RESCUEv6-v9 at varying guide and RESCUE plasmid amounts. Values represent mean+/−S.E.M (n=3).

[0148] FIG. 81: Percent editing of Gluc sites with all 16 possible 5′ and 3′ base combinations with RESCUEv16 and v8 using guides with either G or A mismatches. Values represent mean+/−S.E.M (n=3).

[0149] FIG. 82: Percent editing of RESCUEv1 and RESCUEv2-v8 on a UCG site in the Gluc transcript with guide RNAs of varying U mismatch positions. RESCUE versions are compared with both RanCas13b and PspCas13b. Values represent mean+/−S.E.M (n=3). 20/22 denotes 20 mismatch distance for RanCas13b and 22 mismatch distance for PspCas13b.

[0150] FIG. 83: Percent editing of RESCUEv16 on a UCG site in the Gluc transcript with 30 bp and 50 bp guides with varying U mismatch positions. Values represent mean+/−S.E.M (n=3).

[0151] FIGS. 84A-84D: Editing rates of various yeast reporters for directed evolution. (FIG. 84A) Percent fluorescence correction of the GFP mutation Y66H by RESCUEv3, v7, and v16 with targeting and non-targeting guides. Fluorescence is measured by performing flow cytometry on 10,000 cells. (FIG. 84B) Percent editing correction of the GFP mutation Y66H by RESCUEv3, v7, and v16 with targeting and non-targeting guides. Values represent mean+/−S.E.M (n=3). (FIG. 84C) Percent editing correction of the HIS3 mutation P196L by RESCUEv7, and v16 with targeting and non-targeting guides. Values represent mean+/−S.E.M (n=3). (FIG. 84D) Percent editing correction of the HIS3 mutation S129P by RESCUEv7, and v16 with targeting and non-targeting guides. Values represent mean+/−S.E.M (n=3).

[0152] FIGS. 85A-85B: Biochemical deamination activity of ADAR2 deaminase domain containing RESCUEv2 mutations using recombinant protein. (FIG. 85A) Adenosine deamination activity of ADAR2 deaminase domain protein containing RESCUEv2 mutations with a 22 bp double-stranded RNA substrate containing a center adenine mismatched with a cytosine. Reactions were incubated for varying time points and with and without the deaminase domain. (FIG. 85B) Cytidine deamination activity of ADAR2 deaminase domain protein containing RESCUEv2 mutations with a 22 bp double-stranded RNA substrate containing a center cytosine mismatched with a uridine. Reactions were incubated for varying time points and with and without the deaminase domain.

[0153] FIGS. 86A-86E: Comparison of cytidine deaminase activity of RESCUEv16, full ADAR2 (with RESCUEv16 mutations), ADAR2 deaminase domain (with RESCUEv16 mutations), and without any protein. (FIG. 86A) Percent editing of a site in the Gluc transcript with varying 5′ bases with a targeting guide and RESCUEv16, full ADAR2 (with RESCUEv16 mutations), ADAR2 deaminase domain (with RESCUEv16 mutations), and no protein. Values represent mean+/−S.E.M (n=3). (FIG. 86B) Percent editing of a site in the Gluc transcript with varying 5′ bases with a non-targeting guide and RESCUEv16, full ADAR2 (with RESCUEv16 mutations), ADAR2 deaminase domain (with RESCUEv16 mutations), and no protein. Values represent mean+/−S.E.M (n=3). (FIG. 86C) Editing of a UCG site in the Gluc transcript with RESCUEv16 and guide RNAs containing varying mismatch positions. Values represent mean+/−S.E.M (n=3). (FIG. 86D) Editing of a UCG site in the Gluc transcript with full-length ADAR2 (with RESCUEv16 mutations) and guide RNAs containing varying mismatch positions. Values represent mean+/−S.E.M (n=3). (FIG. 86E) Editing of a UCG site in the Gluc transcript with ADAR2 deaminase domain (with RESCUEv16 mutations) and guide RNAs containing varying mismatch positions. Values represent mean+/−S.E.M (n=3).

[0154] FIGS. 87A-87C: Mismatch position tiling to find optimal editing guide design for RESCUEv16 on endogenous target sites. (FIG. 87A) Percent editing of endogenous target sites with varying base motifs with RESCUEv16 and guides with mismatches at position 7, 9, 11, and 13 and U base flips. Values represent mean+/−S.E.M (n=3). (FIG. 87B) Percent editing of endogenous target sites with varying base motifs with RESCUEv16 and guides with mismatches at position 7, 9, 11, and 13 and C base flips. Values represent mean+/−S.E.M (n=3). (FIG. 87C) Percent editing of endogenous target sites with varying base motifs with RESCUEv16 and guides with mismatches at position 3, 5, 7, 9, and 11 and C and U base flips. Values represent mean+/−S.E.M (n=3).

[0155] FIG. 88: Cytidine deamination activity of varying amounts of RESCUEv0-16 as measured by percent editing at a KRAS site. Values represent mean of three replicates.

[0156] FIG. 89: Percent editing of various disease-relevant mutations on synthetic reporters using RESCUEv16 and guides with varying mismatch positions. Values represent mean+/−S.E.M (n=3).

[0157] FIG. 90: Percent editing at the two ApoE4 cytosines (rs429358 and rs7412) using RESCUEv16 with guides of varying C and U mismatch positions. Values represent mean+/−S.E.M (n=3).

[0158] FIGS. 91A-91C: Specificity of RESCUE versions in the guide duplex window. (FIG. 91A) Schematic of editing site of Gaussia luciferase mutant C82R, with the targeted C highlighted in red and nearby adenine bases numbered and highlighted in gray. (FIG. 91B) Percent editing of at nearby adenine bases in Gaussia luciferase mutant C82R with targeting by RESCUEv0, RESCUEv8, and RESCUEv16. (FIG. 91C) Percent editing of adenine to guanosine at adenine 20 by varying amounts of RESCUEv0-v16. Values represent mean of three replicates.

[0159] FIGS. 92A-92D: Adenosine deaminase activity of RESCUEv0-v16 and RESCUEv16S. (FIG. 92A) Luciferase correction via adenosine deamination of the Gluc transcript by RESCUEv0-v16 and RESCUEv16S using a targeting guide RNA. Values represent mean+/−S.E.M (n=3). (FIG. 92B) Luciferase correction via adenosine deamination of the Gluc transcript by RESCUEv0-v16 and RESCUEv16S using a non-targeting guide RNA. Values represent mean+/−S.E.M (n=3). (FIG. 92C) Percent editing of adenosine to inosine of the Gluc transcript by RESCUEv0-v16 and RESCUEv16S using a targeting guide RNA. Values represent mean+/−S.E.M (n=3). (FIG. 92D) Percent editing of adenosine to inosine of the Gluc transcript by RESCUEv0-v16 and RESCUEv16S using a non-targeting guide RNA. Values represent mean+/−S.E.M (n=3).

[0160] FIGS. 93A-93C: Cytidine deamination activity and off-target activity on a Beta-catenin target site using varying amounts of RESCUEv0-16 and RESCUEv16S. (FIG. 93A) Schematic of editing site of CTNNB1 T41I, with the targeted C highlighted in red and the nearby off-target adenine base highlighted in gray. (FIG. 93B) Percent editing of cytosine to uridine (T41A) by varying amounts of RESCUEv0-v16 and RESCUEv16S. Values represent mean of three replicates. (FIG. 93C) Percent editing of adenine to guanosine at the off-target adenine by varying amounts of RESCUEv0-v16 and RESCUEv16S. Values represent mean of three replicates.

[0161] FIGS. 94A-94E: On target and off-target editing of RESCUEv16 and RESCUEv16S on endogenous targets. (FIG. 94A) Percent editing of endogenous target sites with varying base motifs with RESCUEv16 and RESCUEv16S. Values represent mean+/−S.E.M (n=3). (FIG. 94B) Percent editing of at neighboring adenine bases in NRAS I21I with targeting by RESCUEv16 and RESCUEv16S. (FIG. 94C) Percent editing of at neighboring adenine bases in NF2 T21M with targeting by RESCUEv16 and RESCUEv16S. (FIG. 94D) Percent editing of at neighboring adenine bases in RAFT P30S with targeting by RESCUEv16 and RESCUEv16S. (FIG. 94E) Percent editing of at neighboring adenine bases in CTNNB1 P44S with targeting by RESCUEv16 and RESCUEv16S.

[0162] FIGS. 95A-95B: Summary of amino acid changes enabled by RESCUE. (FIG. 97A) Amino acid conversions possible using cytidine deamination by RESCUE. (FIG. 97B) Codon table showing all potential amino acid changes possible by RESCUE.

[0163] FIG. 96: RESCUE v16S was able to effectively edit endogenous genes.

[0164] FIG. 97: RESCUE v16S maintained some A to I activity.

[0165] FIG. 98: RESCUE v16 was used to target STAT to reduce INFγ/IL6 induction.

[0166] FIGS. 99A-99B: RESCUE targeting induces cell growth.

[0167] FIG. 100. A schematic showing an example transcript tracking method.

[0168] FIG. 101 shows an example system and method of programmable cytidine to uridine conversion according to some embodiments herein.

[0169] FIG. 102 shows example approaches of correcting mutations and/or targeting post-translational signaling or catalysis using base editors according to some embodiments herein.

[0170] FIGS. 103A-103E Evolution of an ADAR2 deaminase domain for cytidine deamination in reporter and endogenous transcripts. FIG. 103A. Schematic of RNA targeting of the catalytic residue mutant (C82R) of Gaussia luciferase reporter transcript (SEQ ID NO:712-714). FIG. 103B. Heatmap depicting the percent editing levels of RESCUEr0-r16 on cytidines flanked by varying bases on the Gluc transcript. More favorable editing motifs are shown at the top, while less favorable motifs (5′C) are shown at the bottom. FIG. 103C. Editing activity of RESCUE on all possible 16 cytidine flanking bases motifs on the Gluc transcript with U-flip or C-flip guides. FIG. 103D. Activity comparison between RESCUE, ADAR2dd without Cas13, full-length ADAR2 without Cas13, or no protein. FIG. 103E. Editing efficiency of RESCUE on a panel of endogenous genes covering multiple motifs. The best guide for each site is shown with the entire panel of guides displayed in FIG. 125.

[0171] FIGS. 104A-104F Phenotypic outcomes of RESCUE on cell growth and signaling FIG. 104A. Schematic of b-catenin domains and RESCUE targeting guide (SEQ ID NO:715-717). FIG. 104B. Schematic of b-catenin activation and cell growth via RESCUE editing.

[0172] FIG. 104C. Percent editing by RESCUE at relevant positions in the CTNNB1 transcript. FIG. 104D. Activation of Wnt/b-catenin signaling by RNA editing as measured by b-catenin-driven (TCF/LEF) luciferase expression. FIG. 104E. Representative microscopy images of RESCUE CTNNB1 targeting and non-targeting guides in HEK293FT cells. FIG. 104F. Quantitation of cellular growth due to activation of CTNNB1 signaling by RNA editing in HEK293FT cells.

[0173] FIGS. 105A-105D RESCUE and REPAIR multiplexing and specificity enhancement via guide engineering. FIG. 105A. Schematic of multiplexed C to U and A to I editing with pre-crRNA guide arrays. FIG. 105B. Simultaneous C to U and A to I editing on CTNNB1 transcripts. FIG. 105C. Schematic of rational engineering with guanine base flips to prevent off-target activity at neighboring adenosine sites (SEQ ID NO:718-719). FIG. 105D. Percent editing at on-target C and off-target A sites for Gaussia luciferase (left) and KRAS (right) using rational introduction of disfavored base flips.

[0174] FIGS. 106A-106G Transcriptome-wide specificity of RESCUE. FIG. 106A. On-target C to U editing and summary of C to U and A to I transcriptome-wide off-targets for RESCUE compared to REPAIR. FIG. 106B. Manhattan plots of RESCUE A to I (left) and C to U (right) off-targets. The on-target C to U edit is highlighted in orange. FIG. 106C. Schematic of the interactions between ADAR2dd residues and double stranded RNA substrate with residues used in a mutagenesis screen for improving specificity highlighted red (SEQ ID NO:720-721). FIG. 106D. Luciferase values for C to U activity with a targeting guide (y-axis) and A to I activity with a non-targeting guide (x-axis) shown for RESCUE and 95 RESCUE mutants. Mutants highlighted in blue have higher specificity with maintained C to U activity. RESCUE is highlighted in red. The T375G mutation that generates REPAIRv2 is shown in orange. FIG. 106E. On-target C to U editing and summary of C to U and A to I transcriptome-wide off targets of RESCUE, REPAIR, and top specificity mutants. FIG. 106F. Manhattan plot of RESCUE-S(+S375A) A to I (left) and C to U (right) off-targets. The on-target C to U edit is highlighted in orange. FIG. 106G. Representative RNA sequencing reads surrounding the on-target Gluc editing site (blue triangle) for RESCUE (top) and RESCUE-S(bottom). A to I edits are highlighted in red; C to U (T) edits are highlighted in blue; sequencing errors are highlighted in yellow (SEQ ID NO:722-767).

[0175] FIGS. 107A-107B Targeted RNA cytidine to uridine editing enables new base conversions. FIG. 107A Amino acid conversions possible using cytidine deamination by RESCUE, with corresponding post-translation modifications and biological activities. FIG. 107B. Schematic of the directed evolution approach, involving rational mutagenesis, yeast screening, and mammalian cell validation of activity. Rational mutagenesis began with targeting residues known to contact the RNA substrate, as shown in the schematic at the top, derived from the crystal structure of ADAR2dd(23). Residues targeted with saturation mutagenesis are highlighted in red. For directed evolution, a HIS3 growth reporter was used to enable positive selection of ADAR2dd mutants in yeast with C to U editing and restoration of the HIS3 gene. Top mutants from each round of yeast evolution are evaluated in mammalian cells for C to U editing activity and then the top mutant is used for the next round of yeast evolution.

[0176] FIG. 108. Comparison of RanCas13b-REPAIR and PspCas13b-REPAIR adenosine deamination activity in yeast with targeting and non-targeting guides. A to I correction of the Y66H mutation in EGPF restores GFP fluorescence and is measured by flow cytometry. As REPAIR with the catalytically inactive Cas13b ortholog from Riemerella anatipestifer (dRanCas13b) was more effective than REPAIR with the catalytically inactive Cas13b ortholog from Prevotella sp. P5-125 (dPspCas13b), we began with a dRanCas13b-ADAR2dd fusion for development of RESCUE.

[0177] FIGS. 109A-109B Screening of inactivating Gluc mutations for generating a cytosine deamination luciferase reporter. FIG. 109A. Luciferase activity of a panel of various Gluc mutants shown to previously have some effect on luciferase activity (33). Values represent mean+/−S.E.M (n=3). FIG. 109B. Luciferase activity of a panel of leucine to proline Gluc mutants. Leucine to proline mutant reporters were focused on because they generate a CCN motif site for cytidine deamination (center C is deaminated). This allows for assaying the effect of all four CCN motifs on RESCUE deamination activity. Values represent mean+/−S.E.M (n=3); WT, wildtype Gluc sequence.

[0178] FIG. 110. Cytidine deamination activity of RESCUEr0-r16 on UCG, CCG, ACG, GCG, CCA, and CCU sites in Gluc. Values represent mean+/−S.E.M (n=3).

[0179] FIGS. 111A-111C Cytidine deamination activity of varying amounts of RESCUEr0-r16. FIG. 111A. Dose response of RESCUEr0-r16 activity as measured by restoration of luciferase activity on a UCG site in the Gluc transcript. Values represent mean of three replicates. FIG. 111B. Dose response of RESCUEr0-r16 activity as measured by C to U editing at a UCG site in the Gluc transcript. Values represent mean of three replicates. FIG. 111C. Dose response of RESCUEr0-r16 activity as measured by restoration of luciferase activity on the T41I site in the CTNNB1 transcript. Values represent mean of three replicates.

[0180] FIG. 112 Percent editing of a UCG site in the Gluc transcript by RESCUEr6-r9 at varying guide and RESCUE plasmid amounts. Values represent mean+/−S.E.M (n=3).

[0181] FIGS. 113A-113E Editing rates of various yeast reporters for directed evolution. FIG. 113A. Percent fluorescence correction of the GFP mutation Y66H by RESCUEr3, r7, and r16 with targeting and non-targeting guides. Fluorescence is measured by performing flow cytometry on 10,000 cells. T, targeting guide; NT, non-targeting guide. FIG. 113B. Percent editing correction of the GFP mutation Y66H by RESCUEr3, r7, and r16 with targeting and non-targeting guides. T, targeting guide; NT, non-targeting guide. FIG. 113C. Percent editing correction of the HIS3 mutation P196L by RESCUEr7, and r16 with targeting and non-targeting guides. T, targeting guide; NT, non-targeting guide. FIG. 113D. Percent editing correction of the HIS3 mutation S129P by RESCUEr7, and r16 with targeting and non-targeting guides. T, targeting guide; NT, non-targeting guide. FIG. 113E. Percent editing correction of the HIS3 mutation S22P by RESCUEr3, r7, and r16 with targeting guides of varying mismatch distance and non-targeting guide at different hours after RESCUE induction. NT, non-targeting guide.

[0182] FIGS. 114A-114C Percent editing of Gluc sites with all 16 possible 5′ and 3′ base combinations with RESCUEr16 and r8 using guides with U, C, G, or A mismatches. FIG. 114A. Percent editing of Gluc sites with all 16 possible 5 ÅL and 3 ÅL base combinations with RESCUEr8 using guides with either U or C mismatches. Values represent mean+/−S.E.M (n=3). FIG. 114B. Percent editing of Gluc sites with all 16 possible 5 ÅL and 3 ÅL base combinations with RESCUEr8 using guides with either G or A mismatches. Values represent mean+/−S.E.M (n=3). FIG. 114C. Percent editing of Gluc sites with all 16 possible 5 ÅL and 3 ÅL base combinations with RESCUEr16 using guides with either G or A mismatches. Values represent mean+/−S.E.M (n=3).

[0183] FIG. 115 Percent editing of RESCUE on a UCG site in the Gluc transcript with 30 bp and 50 bp guides with varying U mismatch positions. Values represent mean+/−S.E.M (n=3).

[0184] FIG. 116 Percent editing of RESCUEr1 and RESCUEr3-r8 on a UCG site in the Gluc transcript with guide RNAs of varying U mismatch positions. Candidate rounds are compared with both RanCas13b and PspCas13b. Values represent mean+/−S.E.M (n=3). 20/22 denotes 20 mismatch distance for RanCas13b and 22 mismatch distance for PspCas13b. As REPAIR uses a fusion of ADAR2dd with dPspCas13b (7), we compared our RESCUE candidate rounds with fusions of PspCas13b and RanCas13b and found them to be equivalently active.

[0185] FIGS. 117A-117B View of RESCUE mutations on the crystal structure of the ADAR2 deaminase domain. FIG. 117A. The RESCUE mutants are shown in the ADAR2 crystal structure (blue) along with the flipped-out cytidine modeled in purple. FIG. 117B. A zoomed in crystal structure view of the mutants at the catalytic deamination site with the RNA with the flipped-out base also shown in purple.

[0186] FIGS. 118A-118D Adenosine deaminase activity of RESCUEr0-r16 and RESCUEr16-S. With REPAIR, efficiency of adenosine deamination is dependent on the guide design choice of position relative to the target adenosine and base flip selection (7), as ADAR2dd prefers to deaminate in mismatch bubbles. The position of the target base within the guide:target dsRNA duplex is particularly important, as Cas13 guides can be placed anywhere without any sequence restriction and there is a small window of optimal activity for ADAR2dd (7). For RESCUE, we tested all possible guide base-flips across from the target cytosine, and found that the optimal base flips for cytidine deamination were either C or U, with optimal editing of the UCG motif with a 30-nt guide RNA with the targeting base-flip position 26 base pairs from the 5 ÅL end of the target. FIG. 118A. Luciferase correction via adenosine deamination of the Gluc transcript by RESCUEr0-r16 and RESCUEr16-S using a targeting guide RNA. Values represent mean+/−S.E.M(n=3). FIG. 118B. Luciferase correction via adenosine deamination of the Gluc transcript by RESCUEr0-v16 and RESCUEr16-S using a non-targeting guide RNA. Values represent mean+/−S.E.M (n=3).

[0187] FIG. 118C. Percent editing of adenosine to inosine of the Gluc transcript by RESCUEr0-r16 and RESCUEr16-S using a targeting guide RNA. Values represent mean+/−S.E.M (n=3).

[0188] FIG. 118D. Percent editing of adenosine to inosine of the Gluc transcript by RESCUEr0-r16 and RESCUEr16-S using a non-targeting guide RNA. Values represent mean+/−S.E.M (n=3).

[0189] FIGS. 119A-119D Evaluation of individual RESCUE mutations added on REPAIR (RESCUEr0) or individual mutations removed from RESCUEr16. FIG. 119A. Evaluation of C to U deaminase activity of individual RESCUE mutations added on REPAIR (RESCUEr0) targeting a site on the luciferase transcript, as measured by luciferase activity restoration. Values represent mean+/−S.E.M (n=3); WT, RESCUEr0 sequence. FIG. 119B. Evaluation of C to U deaminase activity of individual RESCUE mutations added on REPAIR (RESCUEr0) targeting a site on the luciferase transcript, as measured by percent editing. Values represent mean+/−S.E.M (n=3); WT, RESCUEr0 sequence. FIG. 119C. Evaluation of C to U deaminase activity of RESCUEr16 constructs with individual mutations removed targeting a site on the luciferase transcript, as measured by luciferase activity restoration. Values represent mean+/−S.E.M (n=3); WT, RESCUEr16 sequence. FIG. 119D. Evaluation of C to U deaminase activity of RESCUEr16 constructs with individual mutations removed targeting a site on the luciferase transcript, as measured by percent editing. Values represent mean+/−S.E.M (n=3); WT, RESCUEr16 sequence.

[0190] FIGS. 120A-120D Biochemical deamination activity of ADAR2 deaminase domain containing RESCUEr0, r2, r8, 13, and r16 mutations using recombinant protein. FIG. 120A. Adenosine deamination activity of ADAR2 deaminase domain protein containing various candidate mutations with a 22 bp double-stranded RNA substrate containing a center adenine mismatched with a cytidine. Reactions were incubated for varying time points and with and without the deaminase domain. Values represent mean+/−S.E.M (n=3, some error bars occluded by symbols). FIG. 120B. Cytidine deamination activity of ADAR2 deaminase domain protein containing various candidate mutations with a 22 bp double-stranded RNA substrate containing a center cytidine mismatched with a uridine. Reactions were incubated for varying time points and with and without the deaminase domain. Values represent mean+/−S.E.M (n=3, some error bars occluded by symbols). FIG. 120C. RESCUE r0 and r16 cytidine deaminase activity on RNA and DNA substrates, including a cytidine in RNA annealed to complementary DNA (RNA:DNA), a deoxycytidine in DNA annealed to complementary RNA (DNA:RNA), a deoxycytidine in double stranded DNA (dsDNA), and a deoxycytidine in ssDNA. All double-stranded templates contain a cytidine mismatched with a thymidine. Values represent mean+/−S.E.M (n=3). FIG. 120D. RESCUE r0 and r16 adenosine deaminase activity on RNA and DNA substrates, including an adenosine in RNA annealed to complementary DNA (RNA:DNA), a deoxyadenosine in DNA annealed to complementary RNA (DNA:RNA), a deoxyadenosine in double stranded DNA (dsDNA), and a deoxyadenosine in ssDNA. All double-stranded templates contain an adenosine mismatched with a cytidine. Values represent mean+/−S.E.M (n=3).

[0191] FIGS. 121A-121D Comparison of cytidine deaminase activity of RESCUEr16, full ADAR2 (with RESCUEr16 mutations), ADAR2 deaminase domain (with RESCUEr16 mutations), and without any protein. FIG. 121A. Adenosine deaminase activity measured by Cluc activity restoration with a targeting guide and RESCUEr16, full ADAR2 (with RESCUEr16 mutations), ADAR2 deaminase domain (with RESCUEr16 mutations), and no protein. Values represent mean+/−S.E.M (n=3). FIG. 121B. Cytidine deaminase activity measured by Gluc activity restoration with a targeting guide and RESCUEr16, full ADAR2 (with RESCUEr16 mutations), ADAR2 deaminase domain (with RESCUEr16 mutations), and no protein. Values represent mean+/−S.E.M (n=3). FIG. 121C. Percent editing of a site in the Gluc transcript with varying 5 ÅL bases with a targeting guide and RESCUEr16, full ADAR2 (with RESCUEr16 mutations), ADAR2 deaminase domain (with RESCUEr16 mutations), and no protein. Values represent mean+/−S.E.M (n=3). FIG. 121D. Percent editing of a site in the Gluc transcript with varying 5 ÅL bases with a non-targeting guide and RESCUEr16, full ADAR2 (with RESCUEr16 mutations), ADAR2 deaminase domain (with RESCUEr16 mutations), and no protein. Values represent mean+/−S.E.M (n=3).

[0192] FIGS. 122A-122C Comparison of cytidine deaminase activity of RESCUEr16, full ADAR2 (with RESCUEr16 mutations), ADAR2 deaminase domain (with RESCUEr16 mutations), and without any protein. FIG. 122A. Editing of a UCG site in the Gluc transcript with RESCUEr16 and guide RNAs containing varying mismatch positions. Values represent mean+/−S.E.M (n=3). FIG. 122B. Editing of a UCG site in the Gluc transcript with full-length ADAR2 (with RESCUEr16 mutations) and guide RNAs containing varying mismatch positions. Values represent mean+/−S.E.M (n=3). FIG. 122C. Editing of a UCG site in the Gluc transcript with ADAR2 deaminase domain (with RESCUEr16 mutations) and guide RNAs containing varying mismatch positions. Values represent mean+/−S.E.M (n=3).

[0193] FIGS. 123A-123C Cytidine deamination activity of RESCUEr16 on a Gluc transcript with guides without direct repeats of 30 or 50 nt in length and varying mismatches. FIG. 123A. Cytidine deamination activity of RESCUEr16 on a Gluc transcript with 30 nt guides without direct repeats and varying mismatches. Values represent mean+/−S.E.M (n=3). FIG. 123B. Cytidine deamination activity of RESCUEr16 on a Gluc transcript with 50 nt guides without direct repeats and varying mismatches. Values represent mean+/−S.E.M (n=3). FIG. 123C. Cytidine deamination activity of RESCUEr16 on a Gluc transcript with 30 nt guides with direct repeats and varying mismatches. Values represent mean+/−S.E.M (n=3).

[0194] FIGS. 124A-124F Cytidine deamination activity of alternative RNA editing technologies with RESCUE mutations incorporated into them. FIG. 124 A. Cytidine deamination activity of MS2-recruited ADAR deaminase domain(24) with RESCUE mutations on a Gluc transcript with 30 nt guides with different base-flips and varying mismatches. Activity is measured by restoration of luciferase activity. Values represent mean+/−S.E.M (n=3); NT, non-targeting guide. FIG. 124B. Percent Gluc editing by MS2-recruited ADAR deaminase domain(24) with RESCUE mutations on a Gluc transcript with 30 nt guides with different base-flips and varying mismatches. Values represent mean+/−S.E.M (n=3); NT, non-targeting guide. FIG. 124C. Cytidine deamination activity of associated ADAR guide RNA technology(24) with the deaminase domain containing RESCUE mutations on a Gluc transcript with 30 nt guides with different base-flips and varying mismatches. Activity is measured by restoration of luciferase activity. Values represent mean+/−S.E.M (n=3); NT, non-targeting guide. FIG. 124D. Percent Gluc editing by associated ADAR guide RNA technology(24) with the deaminase domain containing RESCUE mutations on a Gluc transcript with 30 nt guides with different base-flips and varying mismatches. Values represent mean+/−S.E.M (n=3); NT, non-targeting guide. FIG. 124E. Cytidine deamination activity of guide RNA-recruited ADAR deaminase domain(11) with RESCUE mutations on a Gluc transcript with 30 nt guides with different base-flips and varying mismatches. Activity is measured by restoration of luciferase activity. Values represent mean+/−S.E.M (n=3); NT, non-targeting guide. FIG. 124F. Percent Gluc editing by guide RNA-recruited ADAR deaminase domain(11) with RESCUE mutations on a Gluc transcript with 30 nt guides with different base-flips and varying mismatches. Values represent mean+/−S.E.M (n=3); NT, non-targeting guide.

[0195] FIGS. 125A-125C Mismatch position tiling to find optimal editing guide design for RESCUE on endogenous target sites. FIG. 125A. Percent editing of endogenous target sites with varying base motifs with RESCUE and guides with mismatches at position 7, 9, 11, and 13 and U base flips. Values represent mean+/−S.E.M (n=3). FIG. 125B. Percent editing of endogenous target sites with varying base motifs with RESCUE and guides with mismatches at position 7, 9, 11, and 13 and C base flips. Values represent mean+/−S.E.M (n=3). FIG. 125C. Percent editing of endogenous target sites with varying base motifs with RESCUE and guides with mismatches at position 3, 5, 7, 9, and 11 and C and U base flips. Values represent mean+/−S.E.M (n=3).

[0196] FIGS. 126A-126B Cytidine deamination activity of RESCUEr0-r16 as measured by percent editing at various endogenous sites and at varying amounts. FIG. 126A. Heatmap depicting editing efficiency of RESCUEr0-r16 on a panel of three endogenous genes. Values represent mean of three replicates. FIG. 126B. Cytidine deamination activity of varying amounts of RESCUEr0-r16 as measured by percent editing at a KRAS site. Values represent mean of three replicates.

[0197] FIGS. 127A-127B Percent editing of various disease-relevant mutations on synthetic reporters. FIG. 127A. Editing efficiency of RESCUE on a set of synthetic versions of relevant T>C disease mutations with the best possible mismatch guide per target site. Editing rates vary between 1% and 42% and conditions are shown sorted by editing efficiency. All editing rates for synthetic sites are listed in Table 31. Values represent mean+/−S.E.M (n=3). FIG. 127B. Editing of disease relevant mutations using RESCUE and guides with varying mismatch positions. Values represent mean+/−S.E.M (n=3).

[0198] FIG. 128 Percent editing at ApoE4 cytosines with RESCUE with guides of varying C and U mismatch positions. ApoE4 variants (rs429358 and rs7412) increase Alzheimer's risk markedly, and are edited by RESCUE at rate up to 5% and 12% on the two sites. All editing rates for synthetic sites are listed in Table 31. Values represent mean+/−S.E.M (n=3).

[0199] FIGS. 129A-129F RNA editing and signal modulation of STAT1/STAT3 by RESCUE. STAT3 and STAT1 are transcription factors that play important roles in signal transduction via the JAK/STAT pathway and are typically activated via phosphorylation by cytokines and growth factors. To demonstrate signaling modulation via RNA editing, we altered activation of the STAT pathway by editing phosphorylation sites Y705 and 5727 on STAT3 and Y701 and S727 on STAT1 with RESCUE over the course of 48 hours. FIG. 129A. Schematic of STAT3 domains and RESCUE guides targeting phosphorylated residues of STAT3 to alter associated signaling pathways (SEQ ID NO:768-770). FIG. 129B. Percent editing at relevant phosphorylated residues in STAT3 by RESCUE. In HEK293FT cells, we observed 6% editing of the S727 STAT3 site and 11% and 7% editing of the Y701 and S727 STAT1 sites, respectively. FIG. 129C. Inhibition of STAT3 signaling by RNA editing as measured by STAT3-driven luciferase expression with guides with different base-flips. These edits resulted in 13% repression of STAT3 and STAT1 activity. FIG. 129D. Percent editing at S727F phosphorylated residue site in STAT1 by RESCUE with guides with varying base-flips. FIG. 129E. Percent editing at Y701C phosphorylated residue site in STAT1 by RESCUE with guides with varying base-flips. FIG. 129F. Inhibition of STAT1 signaling by RNA editing with RESCUE as measured by STATdriven luciferase expression.

[0200] FIGS. 130A-130B Modulation of b-catenin phosphorylation and cell growth in HUVEC cells. FIG. 130A. Quantitation of cellular growth due to activation of CTNNB1 signaling by RNA editing in HUVEC cells. RESCUE stimulated HUVEC growth to levels comparable to levels observed in cells overexpressing a b-catenin phosphorylation-null mutant. NT, nontargeting guide. FIG. 130B. Representative microscopy images of RESCUE CTNNB1 targeting and non-targeting guides in HUVEC cells.

[0201] FIG. 131. RESCUE C to U and A to I activity on transcripts with varying 5′ and 3′ flanking bases around the target site with different C-terminal truncations of dRanCas13b.

[0202] FIGS. 132A-132C Specificity of candidate rounds in the guide duplex window. FIG. 132A. Schematic of editing site of Gaussia luciferase mutant C82R, with the targeted C highlighted in red and nearby adenine bases numbered and highlighted in gray (SEQ ID NO:771). FIG. 132B. Percent editing of at nearby adenine bases in Gaussia luciferase mutant C82R with targeting by RESCUEr0, RESCUEr8, and RESCUEr16. FIG. 132C. Percent editing of adenine to guanosine at adenine 20 by varying amounts of RESCUEr0-r16. Values represent mean of three replicates.

[0203] FIGS. 133A-133D Off-targets nearby target cytidines in single-plex and multiplex targeting by RESCUE r0, r8, and r16. FIG. 133A. Schematic of editing site of KRAS transcript, with the targeted C highlighted in red and nearby adenine bases numbered and highlighted in gray (SEQ ID NO:772). FIG. 133B. Percent editing of at nearby adenine bases in KRAS transcript with targeting by RESCUEr0, RESCUEr8, and RESCUEr16. FIG. 133C. Schematic of multiplexed editing sites of CTNNB1 transcript, with the two targeted C sites highlighted in red and nearby adenine bases numbered and highlighted in gray (SEQ ID NO:773). FIG. 133D. Percent editing of at nearby adenine bases in CTNNB1 transcript with multiplexed targeting by RESCUEr0, RESCUEr8, and RESCUEr16

[0204] FIGS. 134A-134F Characterization of RESCUE and RESCUE-S transcriptome-wide off-targets. FIG. 134A. Predicted effect of transcriptome-wide off-target edits by RESCUE with a targeting guide against a site on the luciferase transcript. FIG. 134B. Predicted oncogenic effects of transcriptome-wide off-target edits by RESCUE with a targeting guide against a site on the luciferase transcript. FIG. 134C. Transcriptome wide off-targets visualized as the number of off-target edits per transcript by RESCUE with a targeting guide against a site on the luciferase transcript. FIG. 134D. Predicted effect of transcriptome-wide off-target edits by RESCUE-S with a targeting guide against a site on the luciferase transcript.

[0205] FIG. 134E. Predicted oncogenic effects of transcriptome-wide off-target edits by RESCUE-S with a targeting guide against a site on the luciferase transcript. FIG. 134F. Transcriptome wide off-targets visualized as the number of off-target edits per transcript by RESCUE-S with a targeting guide against a site on the luciferase transcript.

[0206] FIGS. 135A-135C Characterization of 5′ and 3′ flanking bases of transcriptome-wide off-targets. FIG. 135A. The number of off-targets with each of all 16 possible 5 ÅL and 3 ÅL flanking bases by RESCUE with a targeting guide against a site on the luciferase transcript. FIG. 135B. The number of off-targets with each of all 16 possible 5 ÅL and 3 ÅL flanking bases by RESCUE-S with a targeting guide against a site on the luciferase transcript.

[0207] FIG. 135C. Number of significantly differentially expressed transcripts in conditions with RESCUE constructs targeting luciferase transcripts.

[0208] FIGS. 136A-136B Biochemical deamination activity of ADAR2 deaminase domain containing RESCUEr0, RESCUEr16 and RESCUEr16-S mutations using recombinant protein. FIG. 136A. Adenosine deamination activity of ADAR2 deaminase domain protein containing various candidate mutations with a 22 bp double-stranded RNA substrate containing a center adenine mismatched with a cytosine. Reactions were incubated for varying time points and with and without the deaminase domain. Values represent mean+/−S.E.M (n=3, some error bars occluded by symbols). FIG. 136B. Cytidine deamination activity of ADAR2 deaminase domain protein containing various candidate mutations with a 22 bp double-stranded RNA substrate containing a center cytosine mismatched with a uridine. Reactions were incubated for varying time points and with and without the deaminase domain. Values represent mean+/−S.E.M (n=3, some error bars occluded by symbols).

[0209] FIGS. 137A-137D Adenosine deaminase activity of RESCUE and RESCUE-S. FIG. 137A. Luciferase correction via adenosine deamination of the Gluc transcript by RESCUE and RESCUE-S using a targeting guide RNA. Values represent mean+/−S.E.M (n=3). FIG. 137B. Luciferase correction via adenosine deamination of the Gluc transcript by RESCUE and RESCUE-S using a non-targeting guide RNA. Values represent mean+/−S.E.M (n=3). FIG. 137C. Percent editing of adenosine to inosine of the Gluc transcript by RESCUE and RESCUES using a targeting guide RNA. Values represent mean+/−S.E.M (n=3). FIG. 137D. Percent editing of adenosine to inosine of the Gluc transcript by RESCUE and RESCUES using a non-targeting guide RNA. Values represent mean+/−S.E.M (n=3).

[0210] FIGS. 138A-138C Cytidine deamination activity and off-target activity on a b-catenin target site using varying amounts of RESCUEr0-r16 and RESCUEr16-S. FIG. 138A. Schematic of editing site of CTNNB1 T41I, with the targeted C highlighted in red and the nearby off-target adenine bases highlighted in gray (SEQ ID NO:774). FIG. 138B. Percent editing of cytosine to uridine (T41A) by varying amounts of RESCUEr0-r16 and RESCUEr16-S. Values represent mean of three replicates. FIG. 138C. Percent editing of adenine to guanosine at the off-target adenine by varying amounts of RESCUEr0-r16 and RESCUEr16-S. Values represent mean of three replicates.

[0211] FIGS. 139A-139C Editing of STAT1 and STAT3 by RESCUE and RESCUE-S. FIG. 139A. Schematic of edited sites at STAT3 by C to U and A to I editing (SEQ ID NO:775-778). FIG. 139B. Percent A to I editing at tyrosine residues in STAT1 and STAT3 by RESCUE and RESCUE-S. Values represent mean+/−S.E.M (n=3); NT, non-targeting guide. FIG. 139C. Percent C to U editing at serine residues in STAT1 and STAT3 by RESCUE and RESCUE-S. Values represent mean+/−S.E.M (n=3); NT, non-targeting guide.

[0212] FIGS. 140A-140E On target and off-target editing of RESCUE and RESCUE-S on endogenous targets. FIG. 140A. Percent editing of endogenous target sites with varying base motifs with RESCUE and RESCUE-S. Values represent mean+/−S.E.M (n=3). FIG. 140B. Percent editing of at neighboring adenine bases in NRAS I21I with targeting by RESCUE and RESCUE-S. FIG. 140C. Percent editing of at neighboring adenine bases in NF2 T21M with targeting by RESCUE and RESCUE-S. FIG. 140D. Percent editing of at neighboring adenine bases in RAF1 P30S with targeting by RESCUE and RESCUE-S. FIG. 140E. Percent editing of at neighboring adenine bases in CTNNB1 P44S with targeting by RESCUE and RESCUE-S.

[0213] FIG. 141 Summary of amino acid changes enabled by RESCUE. Codon table showing all potential amino acid changes possible by RESCUE.

[0214] The figures herein are for illustrative purposes only and are not necessarily drawn to scale.

### DETAILED DESCRIPTION OF THE EXAMPLE EMBODIMENTS

### Definitions

[0215] Unless defined otherwise, technical and scientific terms used herein have the same meaning as commonly understood by one of ordinary skill in the art to which this disclosure pertains. Definitions of common terms and techniques in molecular biology may be found in Molecular Cloning: A Laboratory Manual, 2nd edition (1989) (Sambrook, Fritsch, and Maniatis); Molecular Cloning: A Laboratory Manual, 4th edition (2012) (Green and Sambrook); Current Protocols in Molecular Biology (1987) (F. M. Ausubel et al. eds.); the series Methods in Enzymology (Academic Press, Inc.): PCR 2: A Practical Approach (1995) (M. J. MacPherson, B. D. Hames, and G. R. Taylor eds.): Antibodies, A Laboratory Manual (1988) (Harlow and Lane, eds.): Antibodies A Laboratory Manual, 2nd edition 2013 (E. A. Greenfield ed.); Animal Cell Culture (1987) (R.I. Freshney, ed.); Benjamin Lewin, Genes IX, published by Jones and Bartlet, 2008 (ISBN 0763752223); Kendrew et al. (eds.), The Encyclopedia of Molecular Biology, published by Blackwell Science Ltd., 1994 (ISBN 0632021829); Robert A. Meyers (ed.), Molecular Biology and Biotechnology: a Comprehensive Desk Reference, published by VCH Publishers, Inc., 1995 (ISBN 9780471185710); Singleton et al., Dictionary of Microbiology and Molecular Biology 2nd ed., J. Wiley & Sons (New York, N.Y. 1994), March, Advanced Organic Chemistry Reactions, Mechanisms and Structure 4th ed., John Wiley & Sons (New York, N.Y. 1992); and Marten H. Hofker and Jan van Deursen, Transgenic Mouse Methods and Protocols, 2nd edition (2011)

[0216] As used herein, the singular forms “a”, “an”, and “the” include both singular and plural referents unless the context clearly dictates otherwise.

[0217] The term “optional” or “optionally” means that the subsequent described event, circumstance or substituent may or may not occur, and that the description includes instances where the event or circumstance occurs and instances where it does not.

[0218] The recitation of numerical ranges by endpoints includes all numbers and fractions subsumed within the respective ranges, as well as the recited endpoints.

[0219] The terms “about” or “approximately” as used herein when referring to a measurable value such as a parameter, an amount, a temporal duration, and the like, are meant to encompass variations of and from the specified value, such as variations of +/−10% or less, +/−5% or less, +/−1% or less, and +1-0.1% or less of and from the specified value, insofar such variations are appropriate to perform in the disclosed invention. It is to be understood that the value to which the modifier “about” or “approximately” refers is itself also specifically, and preferably, disclosed.

[0220] As used herein, a “biological sample” may contain whole cells and/or live cells and/or cell debris. The biological sample may contain (or be derived from) a “bodily fluid”. The present invention encompasses embodiments wherein the bodily fluid is selected from amniotic fluid, aqueous humour, vitreous humour, bile, blood serum, breast milk, cerebrospinal fluid, cerumen (earwax), chyle, chyme, endolymph, perilymph, exudates, feces, female ejaculate, gastric acid, gastric juice, lymph, mucus (including nasal drainage and phlegm), pericardial fluid, peritoneal fluid, pleural fluid, pus, rheum, saliva, sebum (skin oil), semen, sputum, synovial fluid, sweat, tears, urine, vaginal secretion, vomit and mixtures of one or more thereof. Biological samples include cell cultures, bodily fluids, cell cultures from bodily fluids. Bodily fluids may be obtained from a mammal organism, for example by puncture, or other collecting or sampling procedures.

[0221] The terms “subject,” “individual,” and “patient” are used interchangeably herein to refer to a vertebrate, preferably a mammal, more preferably a human. Mammals include, but are not limited to, murines, simians, humans, farm animals, sport animals, and pets. Tissues, cells and their progeny of a biological entity obtained in vivo or cultured in vitro are also encompassed.

[0222] Whenever reference is made herein to Cas13, it will be understood that a mutated or engineered Cas13 according to the invention as described herein is meant, unless explicitly indicated otherwise. Whenever reference is made herein to Cas13, preferably a mutated or engineered Cas13a, Cas13b, Cas13c, or Cas13d according to the invention as described herein is meant, unless explicitly indicated otherwise. Whenever reference is made herein to Cas13, preferably a mutated or engineered Cas13b according to the invention as described herein is meant, unless explicitly indicated otherwise.

[0223] Various embodiments are described hereinafter. It should be noted that the specific embodiments are not intended as an exhaustive description or as a limitation to the broader aspects discussed herein. One aspect described in conjunction with a particular embodiment is not necessarily limited to that embodiment and can be practiced with any other embodiment(s). Reference throughout this specification to “one embodiment”, “an embodiment,” “an example embodiment,” means that a particular feature, structure or characteristic described in connection with the embodiment is included in at least one embodiment of the present invention. Thus, appearances of the phrases “in one embodiment,” “in an embodiment,” or “an example embodiment” in various places throughout this specification are not necessarily all referring to the same embodiment, but may. Furthermore, the particular features, structures or characteristics may be combined in any suitable manner, as would be apparent to a person skilled in the art from this disclosure, in one or more embodiments. Furthermore, while some embodiments described herein include some but not other features included in other embodiments, combinations of features of different embodiments are meant to be within the scope of the invention. For example, in the appended claims, any of the claimed embodiments can be used in any combination.

[0224] All publications, published patent documents, and patent applications cited herein are hereby incorporated by reference to the same extent as though each individual publication, published patent document, or patent application was specifically and individually indicated as being incorporated by reference.

### Overview

[0225] In one aspect, embodiments disclosed herein are directed to an engineered CRISPR-Cas protein comprising one or more modified amino acids. In certain embodiments, the engineered CRISPR-Cas protein increases or decreases one or more of PFS recognition/specificity, gRNA binding, protease activity, polynucleotide binding capability, stability, specificity, target binding, off-target binding, and/or catalytic activity as compared to a corresponding wild-type CRISPR-Cas protein. In certain embodiments, the CRISPR-Cas protein comprises one or more HEPN domains, and comprises one or more modified amino acids. The modified amino acids may interact with a guide RNA that forms a complex with the CRISPR-Cas protein, and/or are in a HEPN active site, an inter-domain linker domain, a lid domain, a helical domain or a bridge helix domain of the CRISPR-Cas protein, or a combination thereof. In some examples, the engineered CRISPR-Cas protein comprising one or more HEPN domains and further comprising one or more modified amino acids, wherein the amino acids: interact with a guide RNA that forms a complex with the engineered CRISPR-Cas protein; are in a HEPN active site, an inter-domain linker domain, a lid domain, a helical domain 1, a helical domain 2, or a bridge helix domain of the engineered CRISPR-Cas protein; or a combination thereof.

[0226] In another aspect, embodiments disclosed herein provide a sub-set of newly identified CRISPR-Cas orthologs that are smaller in size than previously discovered CRISPR-Cas orthologs, including further modifications to and uses thereof. In particular embodiments, the CRISPR-Cas orthologs are less than about 1000 amino acids and can be optionally provided as part of a fusion protein.

[0227] Engineered nucleotide deaminases are also provided herein. In certain embodiments, the engineered nucleotide deaminases are adenosine deaminases that can be engineered to comprise cytidine deaminase activity. In embodiments, the engineered nucleotide deaminases may be fused to a Cas protein, including the CRISPR-Cas proteins disclosed herein.

[0228] In another aspect, embodiments disclosed herein include systems and uses for such modified CRISPR-Cas proteins including, but not limited to, diagnostics, base editing therapeutics and methods of detection. Fusion proteins comprising a CRISPR Cas protein, including those disclosed herein, and nucleotide deaminase may also be used for base editing. Delivery of the proteins and systems disclosed is also provided, including to a variety of cells and via a variety of particles, vesicles and vectors.

### CRISPR-Cas Systems in General

[0229] In general, the CRISPR-Cas or CRISPR system refers collectively to transcripts and other elements involved in the expression of or directing the activity of CRISPR-associated (“Cas”) genes, including sequences encoding a Cas gene, a tracr (trans-activating CRISPR) sequence (e.g. tracrRNA or an active partial tracrRNA), a tracr-mate sequence (encompassing a “direct repeat” and a tracrRNA-processed partial direct repeat in the context of an endogenous CRISPR system), a guide sequence (also referred to as a “spacer” in the context of an endogenous CRISPR system), or “RNA(s)” as that term is herein used (e.g., RNA(s) to guide Cas, such as Cas9, e.g. CRISPR RNA and transactivating (tracr) RNA or a single guide RNA (sgRNA) (chimeric RNA)) or other sequences and transcripts from a CRISPR locus. In general, a CRISPR system is characterized by elements that promote the formation of a CRISPR complex at the site of a target sequence (also referred to as a protospacer in the context of an endogenous CRISPR system). When the CRISPR protein is a Class 2 Type VI effector, a tracrRNA is not required. In an engineered system of the invention, the direct repeat may encompass naturally-occurring sequences or non-naturally-occurring sequences. The direct repeat of the invention is not limited to naturally occurring lengths and sequences. A direct repeat can be 36nt in length, but a longer or shorter direct repeat can vary. For example, a direct repeat can be 30nt or longer, such as 30-100 nt or longer. For example, a direct repeat can be 30 nt, 40nt, 50nt, 60nt, 70nt, 70nt, 80nt, 90nt, 100nt or longer in length. In some embodiments, a direct repeat of the invention can include synthetic nucleotide sequences inserted between the 5′ and 3′ ends of naturally occurring direct repeats. In certain embodiments, the inserted sequence may be self-complementary, for example, 20%, 30%, 40%, 50%, 60%, 70%, 80%, 90%, or 100% self-complementary. Furthermore, a direct repeat of the invention may include insertions of nucleotides such as an aptamer or sequences that bind to an adapter protein (for association with functional domains). In certain embodiments, one end of a direct repeat containing such an insertion is roughly the first half of a short DR and the end is roughly the second half of the short DR.

[0230] The CRISPR-Cas protein (used interchangeably herein with “Cas protein”, “Cas effector”) may include Cas9, Cas 12 (e.g., Cas12a, Cas12b, Cas12c, Cas12d, etc.), Cas13 (e.g., Cas13a, Cas13b (such as Cas13b-t1, Cas13b-t2, Cas13b-t3), Cas13c, Cas13d, etc.), Cas14, CasX, and CasY. In some embodiments, the CRISPR-Cas protein may be a type VI CRISPR-Cas protein. For example, the Type VI CRISPR-Cas protein may be a Cas13 protein. The Cas13 protein may be Cas13a, a Cas13b, a Cas13c, or a Cas13d. In some examples, the CRISPR-Cas protein is Cas13a. In some examples, the CRISPR-Cas protein is Cas13b. In some examples, the CRISPR-Cas protein is Cas13c. In some examples, the CRISPR-Cas protein is Cas13d.

[0231] In some embodiments, an engineered CRISPR-Cas protein comprising one or more HEPN domains and is less than 1000 amino acids in length. For example, the protein may be less than 950, less than 900, less than 850, less than 800, less, or than 750 amino acids in size.

[0232] In certain example embodiments, the CRISPR-Cas protein comprises at least one HEPN domain, including but not limited to the HEPN domains described herein, HEPN domains known in the art, and domains recognized to be HEPN domains by comparison to consensus sequence motifs. Several such domains are provided herein. In one non-limiting example, a consensus sequence can be derived from the sequences of C2c2 or Cas13b orthologs provided herein. In certain example embodiments, the effector protein comprises a single HEPN domain. In certain other example embodiments, the effector protein comprises two HEPN domains.

[0233] In one example embodiment, the one or more HEPN domains comprises a RxxxxH motif. The RxxxxH motif sequence can be, without limitation, from a HEPN domain described herein or a HEPN domain known in the art. RxxxxH motif sequences further include motif sequences created by combining portions of two or more HEPN domains. As noted, consensus sequences can be derived from the sequences of the orthologs disclosed in U.S. Provisional Patent Application 62/432,240 entitled “Novel CRISPR Enzymes and Systems,” U.S. Provisional Patent Application 62/471,710 entitled “Novel Type VI CRISPR Orthologs and Systems” filed on Mar. 15, 2017, and U.S. Provisional patent application entitled “Novel Type VI CRISPR Orthologs and Systems,” labeled as attorney docket number 47627-05-2133 and filed on Apr. 12, 2017.

[0234] In an embodiment of the invention, a HEPN domain comprises at least one RxxxxH motif comprising the sequence of R{N/H/K}X₁X₂X₃H. In an embodiment of the invention, a HEPN domain comprises a RxxxxH motif comprising the sequence of R{N/H}X₁X₂X₃H. In an embodiment of the invention, a HEPN domain comprises the sequence of R{N/K}X₁X₂X₃H. In certain embodiments, X₁ is R, S, D, E, Q, N, G, Y, or H. In certain embodiments, X₂ is I, S, T, V, or L. In certain embodiments, X₃ is L, F, N, Y, V, I, S, D, E, or A.

[0235] In the context of formation of a CRISPR complex, “target sequence” refers to a sequence to which a guide sequence is designed to have complementarity, where hybridization between a target sequence and a guide sequence promotes the formation of a CRISPR complex. A target sequence may comprise any polynucleotide, such as DNA or RNA polynucleotides. In some embodiments, a target sequence is located in the nucleus or cytoplasm of a cell. In some embodiments, direct repeats may be identified in silico by searching for repetitive motifs that fulfill any or all of the following criteria: 1. found in a 2Kb window of genomic sequence flanking the type II CRISPR locus; 2. span from 20 to 50 bp; and 3. interspaced by 20 to 50 bp. In some embodiments, 2 of these criteria may be used, for instance 1 and 2, 2 and 3, or 1 and 3. In some embodiments, all 3 criteria may be used.

[0236] In embodiments of the invention the terms guide sequence and guide RNA, e.g., RNA capable of guiding CRISPR-Cas effector proteins to a target locus, are used interchangeably as in herein cited documents such as WO 2014/093622 (PCT/US2013/074667). In general, a guide sequence (or spacer sequence) is any polynucleotide sequence having sufficient complementarity with a target polynucleotide sequence to hybridize with the target sequence and direct sequence-specific binding of a CRISPR complex to the target sequence. In some embodiments, the degree of complementarity between a guide sequence and its corresponding target sequence, when optimally aligned using a suitable alignment algorithm, is about or more than about 50%, 60%, 75%, 80%, 85%, 90%, 95%, 97.5%, 99%, or more. Optimal alignment may be determined with the use of any suitable algorithm for aligning sequences, non-limiting example of which include the Smith-Waterman algorithm, the Needleman-Wunsch algorithm, algorithms based on the Burrows-Wheeler Transform (e.g. the Burrows Wheeler Aligner), ClustalW, Clustal X, BLAT, Novoalign (Novocraft Technologies; available at www.novocraft.com), ELAND (Illumina, San Diego, Calif.), SOAP (available at soap.genomics.org.cn), and Maq (available at maq.sourceforge.net). In some embodiments, a guide sequence (or spacer sequence) is about or more than about 5, 10, 11, 12, 13, 14, 15, 16, 17, 18, 19, 20, 21, 22, 23, 24, 25, 26, 27, 28, 29, 30, 35, 40, 45, 50, 75, or more nucleotides in length. In some embodiments, a guide sequence is less than about 75, 50, 45, 40, 35, 30, 25, 20, 15, 12, or fewer nucleotides in length. Preferably the guide sequence is 10-40 nucleotides long, such as 20-30 or 20-40 nucleotides long or longer, such as 30 nucleotides long or about 30 nucleotides long. In certain embodiments, the guide sequence is 10-30 nucleotides long, such as 20-30 or 20-40 nucleotides long or longer, such as 30 nucleotides long or about 30 nucleotides long for CRISPR-Cas effectors. In certain embodiments, the guide sequence is 10-30 nucleotides long, such as 20-30 nucleotides long, such as 30 nucleotides long. The ability of a guide sequence to direct sequence-specific binding of a CRISPR complex to a target sequence may be assessed by any suitable assay. For example, the components of a CRISPR system sufficient to form a CRISPR complex, including the guide sequence to be tested, may be provided to a host cell having the corresponding target sequence, such as by transfection with vectors encoding the components of the CRISPR sequence, followed by an assessment of preferential cleavage within the target sequence, such as by Surveyor assay as described herein. Similarly, cleavage of a target polynucleotide sequence may be evaluated in a test tube by providing the target sequence, components of a CRISPR complex, including the guide sequence to be tested and a control guide sequence different from the test guide sequence, and comparing binding or rate of cleavage at the target sequence between the test and control guide sequence reactions. Other assays are possible, and will occur to those skilled in the art.

[0237] In a classic CRISPR-Cas systems, the degree of complementarity between a guide sequence and its corresponding target sequence can be about or more than about 50%, 60%, 75%, 80%, 85%, 90%, 95%, 97.5%, 99%, or 100%; a guide or RNA or crRNA can be about or more than about 5, 10, 11, 12, 13, 14, 15, 16, 17, 18, 19, 20, 21, 22, 23, 24, 25, 26, 27, 28, 29, 30, 35, 40, 45, 50, 75, or more nucleotides in length; or guide or RNA or crRNA can be less than about 75, 50, 45, 40, 35, 30, 25, 20, 15, 12, or fewer nucleotides in length; and advantageously tracr RNA is 30 or 50 nucleotides in length. However, an aspect of the invention is to reduce off-target interactions, e.g., reduce the guide interacting with a target sequence having low complementarity. Indeed, in the examples, it is shown that the invention involves mutations that result in the CRISPR-Cas system being able to distinguish between target and off-target sequences that have greater than 80% to about 95% complementarity, e.g., 83%-84% or 88-89% or 94-95% complementarity (for instance, distinguishing between a target having 18 nucleotides from an off-target of 18 nucleotides having 1, 2 or 3 mismatches). Accordingly, in the context of the present invention the degree of complementarity between a guide sequence and its corresponding target sequence is greater than 94.5% or 95% or 95.5% or 96% or 96.5% or 97% or 97.5% or 98% or 98.5% or 99% or 99.5% or 99.9%, or 100%. Off target is less than 100% or 99.9% or 99.5% or 99% or 99% or 98.5% or 98% or 97.5% or 97% or 96.5% or 96% or 95.5% or 95% or 94.5% or 94% or 93% or 92% or 91% or 90% or 89% or 88% or 87% or 86% or 85% or 84% or 83% or 82% or 81% or 80% complementarity between the sequence and the guide, with it advantageous that off target is 100% or 99.9% or 99.5% or 99% or 99% or 98.5% or 98% or 97.5% or 97% or 96.5% or 96% or 95.5% or 95% or 94.5% complementarity between the sequence and the guide.

[0238] In certain embodiments, modulations of cleavage efficiency can be exploited by introduction of mismatches, e.g. 1 or more mismatches, such as 1 or 2 mismatches between spacer sequence and target sequence, including the position of the mismatch along the spacer/target. The more central (i.e. not 3′ or 5′) for instance a double mismatch is, the more cleavage efficiency is affected. Accordingly, by choosing mismatch position along the spacer, cleavage efficiency can be modulated. By means of example, if less than 100% cleavage of targets is desired (e.g. in a cell population), 1 or more, such as preferably 2 mismatches between spacer and target sequence may be introduced in the spacer sequences. The more central along the spacer of the mismatch position, the lower the cleavage percentage.

[0239] The methods according to the invention as described herein comprehend inducing one or more nucleotide modifications in a eukaryotic cell (in vitro, i.e. in an isolated eukaryotic cell) as herein discussed comprising delivering to cell a vector as herein discussed. The mutation(s) can include the introduction, deletion, or substitution of one or more nucleotides at each target sequence of cell(s) via the guide(s) RNA(s) or sgRNA(s). The mutations can include the introduction, deletion, or substitution of 1-75 nucleotides at each target sequence of said cell(s) via the guide(s) RNA(s). The mutations can include the introduction, deletion, or substitution of 1, 5, 10, 11, 12, 13, 14, 15, 16, 17, 18, 19, 20, 21, 22, 23, 24, 25, 26, 27, 28, 29, 30, 35, 40, 45, 50, or 75 nucleotides at each target sequence of said cell(s) via the guide(s) RNA(s). The mutations can include the introduction, deletion, or substitution of 5, 10, 11, 12, 13, 14, 15, 16, 17, 18, 19, 20, 21, 22, 23, 24, 25, 26, 27, 28, 29, 30, 35, 40, 45, 50, or 75 nucleotides at each target sequence of said cell(s) via the guide(s) RNA(s). The mutations include the introduction, deletion, or substitution of 10, 11, 12, 13, 14, 15, 16, 17, 18, 19, 20, 21, 22, 23, 24, 25, 26, 27, 28, 29, 30, 35, 40, 45, 50, or 75 nucleotides at each target sequence of said cell(s) via the guide(s) RNA(s). The mutations can include the introduction, deletion, or substitution of 20, 21, 22, 23, 24, 25, 26, 27, 28, 29, 30, 35, 40, 45, 50, or 75 nucleotides at each target sequence of said cell(s) via the guide(s) RNA(s). The mutations can include the introduction, deletion, or substitution of 40, 45, 50, 75, 100, 200, 300, 400 or 500 nucleotides at each target sequence of said cell(s) via the guide(s) RNA(s).

[0240] For minimization of toxicity and off-target effect, it will be important to control the concentration of Cas mRNA or protein and guide RNA delivered. Optimal concentrations of Cas mRNA or protein and guide RNA can be determined by testing different concentrations in a cellular or non-human eukaryote animal model and using deep sequencing the analyze the extent of modification at potential off-target genomic loci.

[0241] Typically, in the context of an endogenous CRISPR system, formation of a CRISPR complex (comprising a guide sequence hybridized to a target sequence and complexed with one or more Cas proteins) results in cleavage in or near (e.g. within 1, 2, 3, 4, 5, 6, 7, 8, 9, 10, 20, 50, or more base pairs from) the target sequence, but may depend on for instance secondary structure, in particular in the case of RNA targets. In some cases, in the context of an endogenous CRISPR system, formation of a CRISPR complex (comprising a guide sequence hybridized to a target sequence and complexed with one or more Cas proteins) results in cleavage of one or both strands (if applicable) in or near (e.g. within 1, 2, 3, 4, 5, 6, 7, 8, 9, 10, 20, 50, or more base pairs from) the target sequence.

[0242] In particularly preferred embodiments according to the invention, the guide RNA (capable of guiding Cas to a target locus) may comprise (1) a guide sequence capable of hybridizing to a target locus (a polynucleotide target locus, such as an RNA target locus) in the eukaryotic cell; (2) a direct repeat (DR) sequence) which reside in a single RNA, i.e. an sgRNA (arranged in a 5′ to 3′ orientation) or crRNA.

[0243] With respect to general information on CRISPR-Cas Systems, components thereof, and delivery of such components, including methods, materials, delivery vehicles, vectors, particles, AAV, and making and using thereof, including as to amounts and formulations, all useful in the practice of the instant invention, reference is made to: U.S. Pat. Nos. 8,999,641, 8,993,233, 8,945,839, 8,932,814, 8,906,616, 8,895,308, 8,889,418, 8,889,356, 8,871,445, 8,865,406, 8,795,965, 8,771,945 and 8,697,359; US Patent Publications US 2014-0310830 (U.S. application Ser. No. 14/105,031), US 2014-0287938 A1 (U.S. application Ser. No. 14/213,991), US 2014-0273234 A1 (U.S. application Ser. No. 14/293,674), US2014-0273232 A1 (U.S. application Ser. No. 14/290,575), US 2014-0273231 (U.S. application Ser. No. 14/259,420), US 2014-0256046 A1 (U.S. application Ser. No. 14/226,274), US 2014-0248702 A1 (U.S. application Ser. No. 14/258,458), US 2014-0242700 A1 (U.S. application Ser. No. 14/222,930), US 2014-0242699 A1 (U.S. application Ser. No. 14/183,512), US 2014-0242664 A1 (U.S. application Ser. No. 14/104,990), US 2014-0234972 A1 (U.S. application Ser. No. 14/183,471), US 2014-0227787 A1 (U.S. application Ser. No. 14/256,912), US 2014-0189896 A1 (U.S. application Ser. No. 14/105,035), US 2014-0186958 (U.S. application Ser. No. 14/105,017), US 2014-0186919 A1 (U.S. application Ser. No. 14/104,977), US 2014-0186843 A1 (U.S. application Ser. No. 14/104,900), US 2014-0179770 A1 (U.S. application Ser. No. 14/104,837) and US 2014-0179006 A1 (U.S. application Ser. No. 14/183,486), US 2014-0170753 (U.S. application Ser. No. 14/183,429); European Patents EP 2 784 162 B1 and EP 2 771 468 B1; European Patent Applications EP 2 771 468 (EP13818570.7), EP 2 764 103 (EP13824232.6), and EP 2 784 162 (EP14170383.5); and PCT Patent Publications PCT Patent Publications WO 2014/093661 (PCT/US2013/074743), WO 2014/093694 (PCT/US2013/074790), WO 2014/093595 (PCT/US2013/074611), WO 2014/093718 (PCT/US2013/074825), WO 2014/093709 (PCT/US2013/074812), WO 2014/093622 (PCT/US2013/074667), WO 2014/093635 (PCT/US2013/074691), WO 2014/093655 (PCT/US2013/074736), WO 2014/093712 (PCT/US2013/074819), WO 2014/093701 (PCT/US2013/074800), WO 2014/018423 (PCT/US2013/051418), WO 2014/204723 (PCT/US2014/041790), WO 2014/204724 (PCT/US2014/041800), WO 2014/204725 (PCT/US2014/041803), WO 2014/204726 (PCT/US2014/041804), WO 2014/204727 (PCT/US2014/041806), WO 2014/204728 (PCT/US2014/041808), WO 2014/204729 (PCT/US2014/041809). Reference is also made to U.S. provisional patent applications 61/758,468; 61/802,174; 61/806,375; 61/814,263; 61/819,803 and 61/828,130, filed on Jan. 30, 2013; Mar. 15, 2013; Mar. 28, 2013; Apr. 20, 2013; May 6, 2013 and May 28, 2013 respectively. Reference is also made to U.S. provisional patent application 61/836,123, filed on Jun. 17, 2013. Reference is additionally made to U.S. provisional patent applications 61/835,931, 61/835,936, 61/836,127, 61/836,101, 61/836,080 and 61/835,973, each filed Jun. 17, 2013. Further reference is made to U.S. provisional patent applications 61/862,468 and 61/862,355 filed on Aug. 5, 2013; 61/871,301 filed on Aug. 28, 2013; 61/960,777 filed on Sep. 25, 2013 and 61/961,980 filed on Oct. 28, 2013. Reference is yet further made to: PCT Patent applications Nos: PCT/US2014/041803, PCT/US2014/041800, PCT/US2014/041809, PCT/US2014/041804 and PCT/US2014/041806, each filed Jun. 10, 2014 6/10/14; PCT/US2014/041808 filed Jun. 11, 2014; and PCT/US2014/62558 filed Oct. 28, 2014, and U.S. Provisional Patent Applications Ser. Nos. 61/915,150, 61/915,301, 61/915,267 and 61/915,260, each filed Dec. 12, 2013; 61/757,972 and 61/768,959, filed on Jan. 29, 2013 and Feb. 25, 2013; 61/835,936, 61/836,127, 61/836,101, 61/836,080, 61/835,973, and 61/835,931, filed Jun. 17, 2013; 62/010,888 and 62/010,879, both filed Jun. 11, 2014; 62/010,329 and 62/010,441, each filed Jun. 10, 2014; 61/939,228 and 61/939,242, each filed Feb. 12, 2014; 61/980,012, filed Apr. 15, 2014; 62/038,358, filed Aug. 17, 2014; 62/054,490, 62/055,484, 62/055,460 and 62/055,487, each filed Sep. 25, 2014; and 62/069,243, filed Oct. 27, 2014. Reference is also made to U.S. provisional patent applications Nos. 62/055,484, 62/055,460, and 62/055,487, filed Sep. 25, 2014; U.S. provisional patent application 61/980,012, filed Apr. 15, 2014; and U.S. provisional patent application 61/939,242 filed Feb. 12, 2014. Reference is made to PCT application designating, inter alia, the United States, application No. PCT/US14/41806, filed Jun. 10, 2014. Reference is made to U.S. provisional patent application 61/930,214 filed on Jan. 22, 2014. Reference is made to U.S. provisional patent applications 61/915,251; 61/915,260 and 61/915,267, each filed on Dec. 12, 2013. Reference is made to US provisional patent application U.S. Ser. No. 61/980,012 filed Apr. 15, 2014. Reference is made to PCT application designating, inter alia, the United States, application No. PCT/US14/41806, filed Jun. 10, 2014. Reference is made to U.S. provisional patent application 61/930,214 filed on Jan. 22, 2014. Reference is made to U.S. provisional patent applications 61/915,251; 61/915,260 and 61/915,267, each filed on Dec. 12, 2013.

[0244] Mention is also made of U.S. application 62/091,455, filed, 12 Dec. 2014, PROTECTED GUIDE RNAS (PGRNAS); U.S. application 62/096,708, 24 Dec. 2014, PROTECTED GUIDE RNAS (PGRNAS); U.S. application 62/091,462, 12 Dec. 2014, DEAD GUIDES FOR CRISPR TRANSCRIPTION FACTORS; U.S. application 62/096,324, 23 Dec. 2014, DEAD GUIDES FOR CRISPR TRANSCRIPTION FACTORS; U.S. application 62/091,456, 12 Dec. 2014, ESCORTED AND FUNCTIONALIZED GUIDES FOR CRISPR-CAS SYSTEMS; U.S. application 62/091,461, 12 Dec. 2014, DELIVERY, USE AND THERAPEUTIC APPLICATIONS OF THE CRISPR-CAS SYSTEMS AND COMPOSITIONS FOR GENOME EDITING AS TO HEMATOPOETIC STEM CELLS (HSCs); U.S. application 62/094,903, 19 Dec. 2014, UNBIASED IDENTIFICATION OF DOUBLE-STRAND BREAKS AND GENOMIC REARRANGEMENT BY GENOME-WISE INSERT CAPTURE SEQUENCING; U.S. application 62/096,761, 24 Dec. 2014, ENGINEERING OF SYSTEMS, METHODS AND OPTIMIZED ENZYME AND GUIDE SCAFFOLDS FOR SEQUENCE MANIPULATION; U.S. application 62/098,059, 30 Dec. 2014, RNA-TARGETING SYSTEM; U.S. application 62/096,656, 24 Dec. 2014, CRISPR HAVING OR ASSOCIATED WITH DESTABILIZATION DOMAINS; U.S. application 62/096,697, 24 Dec. 2014, CRISPR HAVING OR ASSOCIATED WITH AAV; U.S. application 62/098,158, 30 Dec. 2014, ENGINEERED CRISPR COMPLEX INSERTIONAL TARGETING SYSTEMS; U.S. application 62/151,052, 22 Apr. 2015, CELLULAR TARGETING FOR EXTRACELLULAR EXOSOMAL REPORTING; U.S. application 62/054,490, 24 Sep. 2014, DELIVERY, USE AND THERAPEUTIC APPLICATIONS OF THE CRISPR-CAS SYSTEMS AND COMPOSITIONS FOR TARGETING DISORDERS AND DISEASES USING PARTICLE DELIVERY COMPONENTS; U.S. application 62/055,484, 25 Sep. 2014, SYSTEMS, METHODS AND COMPOSITIONS FOR SEQUENCE MANIPULATION WITH OPTIMIZED FUNCTIONAL CRISPR-CAS SYSTEMS; U.S. application 62/087,537, 4 Dec. 2014, SYSTEMS, METHODS AND COMPOSITIONS FOR SEQUENCE MANIPULATION WITH OPTIMIZED FUNCTIONAL CRISPR-CAS SYSTEMS; U.S. application 62/054,651, 24 Sep. 2014, DELIVERY, USE AND THERAPEUTIC APPLICATIONS OF THE CRISPR-CAS SYSTEMS AND COMPOSITIONS FOR MODELING COMPETITION OF MULTIPLE CANCER MUTATIONS IN VIVO; U.S. application 62/067,886, 23 Oct. 2014, DELIVERY, USE AND THERAPEUTIC APPLICATIONS OF THE CRISPR-CAS SYSTEMS AND COMPOSITIONS FOR MODELING COMPETITION OF MULTIPLE CANCER MUTATIONS IN VIVO; U.S. application 62/054,675, 24 Sep. 2014, DELIVERY, USE AND THERAPEUTIC APPLICATIONS OF THE CRISPR-CAS SYSTEMS AND COMPOSITIONS IN NEURONAL CELLS/TISSUES; U.S. application 62/054,528, 24 Sep. 2014, DELIVERY, USE AND THERAPEUTIC APPLICATIONS OF THE CRISPR-CAS SYSTEMS AND COMPOSITIONS IN IMMUNE DISEASES OR DISORDERS; U.S. application 62/055,454, 25 Sep. 2014, DELIVERY, USE AND THERAPEUTIC APPLICATIONS OF THE CRISPR-CAS SYSTEMS AND COMPOSITIONS FOR TARGETING DISORDERS AND DISEASES USING CELL PENETRATION PEPTIDES (CPP); U.S. application 62/055,460, 25 Sep. 2014, MULTIFUNCTIONAL-CRISPR COMPLEXES AND/OR OPTIMIZED ENZYME LINKED FUNCTIONAL-CRISPR COMPLEXES; U.S. application 62/087,475, 4 Dec. 2014, FUNCTIONAL SCREENING WITH OPTIMIZED FUNCTIONAL CRISPR-CAS SYSTEMS; U.S. application 62/055,487, 25 Sep. 2014, FUNCTIONAL SCREENING WITH OPTIMIZED FUNCTIONAL CRISPR-CAS SYSTEMS; U.S. application 62/087,546, 4 Dec. 2014, MULTIFUNCTIONAL CRISPR COMPLEXES AND/OR OPTIMIZED ENZYME LINKED FUNCTIONAL-CRISPR COMPLEXES; and U.S. application 62/098,285, 30 Dec. 2014, CRISPR MEDIATED IN VIVO MODELING AND GENETIC SCREENING OF TUMOR GROWTH AND METASTASIS.

[0245] Also with respect to general information on CRISPR-Cas Systems, mention is made of the following (also hereby incorporated herein by reference):
[0246] Multiplex genome engineering using CRISPR/Cas systems. Cong, L., Ran, F. A., Cox, D., Lin, S., Barretto, R., Habib, N., Hsu, P. D., Wu, X., Jiang, W., Marraffini, L. A., & Zhang, F. Science February 15; 339(6121):819-23 (2013);
[0247] RNA-guided editing of bacterial genomes using CRISPR-Cas systems. Jiang W., Bikard D., Cox D., Zhang F, Marraffini L A. Nat Biotechnol March; 31(3):233-9 (2013);
[0248] One-Step Generation of Mice Carrying Mutations in Multiple Genes by CRISPR/Cas-Mediated Genome Engineering. Wang H., Yang H., Shivalila C S., Dawlaty M M., Cheng A W., Zhang F., Jaenisch R. Cell May 9; 153(4):910-8 (2013);
[0249] Optical control of mammalian endogenous transcription and epigenetic states. Konermann S, Brigham M D, Trevino A E, Hsu P D, Heidenreich M, Cong L, Platt R J, Scott D A, Church G M, Zhang F. Nature. August 22; 500(7463):472-6. doi: 10.1038/Nature12466. Epub 2013 Aug. 23 (2013);
[0250] Double Nicking by RNA-Guided CRISPR Cas9 for Enhanced Genome Editing Specificity. Ran, F A., Hsu, P D., Lin, C Y., Gootenberg, J S., Konermann, S., Trevino, A E., Scott, D A., Inoue, A., Matoba, S., Zhang, Y., & Zhang, F. Cell August 28. pii: S0092-8674(13)01015-5 (2013-A);
[0251] DNA targeting specificity of RNA-guided Cas9 nucleases. Hsu, P., Scott, D., Weinstein, J., Ran, F A., Konermann, S., Agarwala, V., Li, Y., Fine, E., Wu, X., Shalem, O., Cradick, T J., Marraffini, L A., Bao, G., & Zhang, F. Nat Biotechnol doi:10.1038/nbt.2647 (2013);
[0252] Genome engineering using the CRISPR-Cas9 system. Ran, F A., Hsu, P D., Wright, J., Agarwala, V., Scott, D A., Zhang, F. Nature Protocols November; 8(11):2281-308 (2013-B); Genome-Scale CRISPR-Cas9 Knockout Screening in Human Cells. Shalem, O., Sanjana, N E., Hartenian, E., Shi, X., Scott, D A., Mikkelson, T., Heckl, D., Ebert, B L., Root, D E., Doench, J G., Zhang, F. Science December 12. (2013). [Epub ahead of print];
[0253] Crystal structure of cas9 in complex with guide RNA and target DNA. Nishimasu, H., Ran, F A., Hsu, P D., Konermann, S., Shehata, S I., Dohmae, N., Ishitani, R., Zhang, F., Nureki, O. Cell February 27, 156(5):935-49 (2014);
[0254] Genome-wide binding of the CRISPR endonuclease Cas9 in mammalian cells. Wu X., Scott D A., Kriz A J., Chiu A C., Hsu P D., Dadon D B., Cheng A W., Trevino A E., Konermann S., Chen S., Jaenisch R., Zhang F., Sharp P A. Nat Biotechnol. April 20. doi: 10.1038/nbt.2889 (2014);
[0255] CRISPR-Cas9 Knockin Mice for Genome Editing and Cancer Modeling. Platt R J, Chen S, Zhou Y, Yim M J, Swiech L, Kempton H R, Dahlman J E, Parnas O, Eisenhaure T M, Jovanovic M, Graham D B, Jhunjhunwala S, Heidenreich M, Xavier R J, Langer R, Anderson D G, Hacohen N, Regev A, Feng G, Sharp P A, Zhang F. Cell 159(2): 440-455 DOI: 10.1016/j.cell.2014.09.014 (2014);
[0256] Development and Applications of CRISPR-Cas9 for Genome Engineering, Hsu P D, Lander E S, Zhang F., Cell. June 5; 157(6):1262-78 (2014).
[0257] Genetic screens in human cells using the CRISPR/Cas9 system, Wang T, Wei J J, Sabatini D M, Lander E S., Science. January 3; 343(6166): 80-84. doi:10.1126/science.1246981 (2014);
[0258] Rational design of highly active sgRNAs for CRISPR-Cas9-mediated gene inactivation, Doench J G, Hartenian E, Graham D B, Tothova Z, Hegde M, Smith I, Sullender M, Ebert B L, Xavier R J, Root D E., (published online 3 Sep. 2014) Nat Biotechnol. December; 32(12):1262-7 (2014);
[0259] In vivo interrogation of gene function in the mammalian brain using CRISPR-Cas9, Swiech L, Heidenreich M, Banerjee A, Habib N, Li Y, Trombetta J, Sur M, Zhang F., (published online 19 Oct. 2014) Nat Biotechnol. January; 33(1):102-6 (2015);
[0260] Genome-scale transcriptional activation by an engineered CRISPR-Cas9 complex, Konermann S, Brigham M D, Trevino A E, Joung J, Abudayyeh O O, Barcena C, Hsu P D, Habib N, Gootenberg J S, Nishimasu H, Nureki O, Zhang F., Nature. January 29; 517(7536):583-8 (2015).
[0261] A split-Cas9 architecture for inducible genome editing and transcription modulation, Zetsche B, Volz S E, Zhang F., (published online 2 Feb. 2015) Nat Biotechnol. February; 33(2):139-42 (2015);
[0262] Genome-wide CRISPR Screen in a Mouse Model of Tumor Growth and Metastasis, Chen S, Sanjana N E, Zheng K, Shalem O, Lee K, Shi X, Scott D A, Song J, Pan J Q, Weissleder R, Lee H, Zhang F, Sharp P A. Cell 160, 1246-1260, Mar. 12, 2015 (multiplex screen in mouse), and
[0263] In vivo genome editing using Staphylococcus aureus Cas9, Ran F A, Cong L, Yan W X, Scott D A, Gootenberg J S, Kriz A J, Zetsche B, Shalem O, Wu X, Makarova K S, Koonin E V, Sharp P A, Zhang F., (published online 1 Apr. 2015), Nature. April 9; 520(7546): 186-91 (2015).
[0264] Shalem et al., “High-throughput functional genomics using CRISPR-Cas9,” Nature Reviews Genetics 16, 299-311 (May 2015).
[0265] Xu et al., “Sequence determinants of improved CRISPR sgRNA design,” Genome Research 25, 1147-1157 (August 2015).
[0266] Parnas et al., “A Genome-wide CRISPR Screen in Primary Immune Cells to Dissect Regulatory Networks,” Cell 162, 675-686 (Jul. 30, 2015).
[0267] Ramanan et al., CRISPR/Cas9 cleavage of viral DNA efficiently suppresses hepatitis B virus,” Scientific Reports 5:10833. doi: 10.1038/srep10833 (Jun. 2, 2015)
[0268] Nishimasu et al., Crystal Structure of Staphylococcus aureus Cas9,” Cell 162, 1113-1126 (Aug. 27, 2015)
[0269] Zetsche et al. (2015), “Cpf1 is a single RNA-guided endonuclease of a class 2 CRISPR-Cas system,” Cell 163, 759-771 (Oct. 22, 2015) doi: 10.1016/j.cell.2015.09.038. Epub Sep. 25, 2015
[0270] Shmakov et al. (2015), “Discovery and Functional Characterization of Diverse Class 2 CRISPR-Cas Systems,” Molecular Cell 60, 385-397 (Nov. 5, 2015) doi: 10.1016/j.molcel.2015.10.008. Epub Oct. 22, 2015
[0271] Dahlman et al., “Orthogonal gene control with a catalytically active Cas9 nuclease,” Nature Biotechnology 33, 1159-1161 (November, 2015)
[0272] Gao et al, “Engineered Cpf1 Enzymes with Altered PAM Specificities,” bioRxiv 091611; doi: dx.doi.org/10.1101/091611 Epub Dec. 4, 2016
[0273] Smargon et al. (2017), “Cas13b Is a Type VI-B CRISPR-Associated RNA-Guided RNase Differentially Regulated by Accessory Proteins Csx27 and Csx28,” Molecular Cell 65, 618-630 (Feb. 16, 2017) doi: 10.1016/j.molcel.2016.12.023. Epub Jan. 5, 2017
   each of which is incorporated herein by reference, may be considered in the practice of the instant invention, and discussed briefly below:
[0274] Cong et al. engineered type II CRISPR-Cas systems for use in eukaryotic cells based on both Streptococcus thermophilus Cas9 and also Streptococcus pyogenes Cas9 and demonstrated that Cas9 nucleases can be directed by short RNAs to induce precise cleavage of DNA in human and mouse cells. Their study further showed that Cas9 as converted into a nicking enzyme can be used to facilitate homology-directed repair in eukaryotic cells with minimal mutagenic activity. Additionally, their study demonstrated that multiple guide sequences can be encoded into a single CRISPR array to enable simultaneous editing of several at endogenous genomic loci sites within the mammalian genome, demonstrating easy programmability and wide applicability of the RNA-guided nuclease technology. This ability to use RNA to program sequence specific DNA cleavage in cells defined a new class of genome engineering tools. These studies further showed that other CRISPR loci are likely to be transplantable into mammalian cells and can also mediate mammalian genome cleavage. Importantly, it can be envisaged that several aspects of the CRISPR-Cas system can be further improved to increase its efficiency and versatility.
[0275] Jiang et al. used the clustered, regularly interspaced, short palindromic repeats (CRISPR)-associated Cas9 endonuclease complexed with dual-RNAs to introduce precise mutations in the genomes of Streptococcus pneumoniae and Escherichia coli. The approach relied on dual-RNA:Cas9-directed cleavage at the targeted genomic site to kill unmutated cells and circumvents the need for selectable markers or counter-selection systems. The study reported reprogramming dual-RNA:Cas9 specificity by changing the sequence of short CRISPR RNA (crRNA) to make single- and multinucleotide changes carried on editing templates. The study showed that simultaneous use of two crRNAs enabled multiplex mutagenesis. Furthermore, when the approach was used in combination with recombineering, in S. pneumoniae, nearly 100% of cells that were recovered using the described approach contained the desired mutation, and in E. coli, 65% that were recovered contained the mutation.
[0276] Wang et al. (2013) used the CRISPR/Cas system for the one-step generation of mice carrying mutations in multiple genes which were traditionally generated in multiple steps by sequential recombination in embryonic stem cells and/or time-consuming intercrossing of mice with a single mutation. The CRISPR/Cas system will greatly accelerate the in vivo study of functionally redundant genes and of epistatic gene interactions.
[0277] Konermann et al. (2013) addressed the need in the art for versatile and robust technologies that enable optical and chemical modulation of DNA-binding domains based CRISPR Cas9 enzyme and also Transcriptional Activator Like Effectors
[0278] Ran et al. (2013-A) described an approach that combined a Cas9 nickase mutant with paired guide RNAs to introduce targeted double-strand breaks. This addresses the issue of the Cas9 nuclease from the microbial CRISPR-Cas system being targeted to specific genomic loci by a guide sequence, which can tolerate certain mismatches to the DNA target and thereby promote undesired off-target mutagenesis. Because individual nicks in the genome are repaired with high fidelity, simultaneous nicking via appropriately offset guide RNAs is required for double-stranded breaks and extends the number of specifically recognized bases for target cleavage. The authors demonstrated that using paired nicking can reduce off-target activity by 50- to 1,500-fold in cell lines and to facilitate gene knockout in mouse zygotes without sacrificing on-target cleavage efficiency. This versatile strategy enables a wide variety of genome editing applications that require high specificity.
[0279] Hsu et al. (2013) characterized SpCas9 targeting specificity in human cells to inform the selection of target sites and avoid off-target effects. The study evaluated >700 guide RNA variants and SpCas9-induced indel mutation levels at >100 predicted genomic off-target loci in 293T and 293FT cells. The authors that SpCas9 tolerates mismatches between guide RNA and target DNA at different positions in a sequence-dependent manner, sensitive to the number, position and distribution of mismatches. The authors further showed that SpCas9-mediated cleavage is unaffected by DNA methylation and that the dosage of SpCas9 and sgRNA can be titrated to minimize off-target modification. Additionally, to facilitate mammalian genome engineering applications, the authors reported providing a web-based software tool to guide the selection and validation of target sequences as well as off-target analyses.
[0280] Ran et al. (2013-B) described a set of tools for Cas9-mediated genome editing via non-homologous end joining (NHEJ) or homology-directed repair (HDR) in mammalian cells, as well as generation of modified cell lines for downstream functional studies. To minimize off-target cleavage, the authors further described a double-nicking strategy using the Cas9 nickase mutant with paired guide RNAs. The protocol provided by the authors experimentally derived guidelines for the selection of target sites, evaluation of cleavage efficiency and analysis of off-target activity. The studies showed that beginning with target design, gene modifications can be achieved within as little as 1-2 weeks, and modified clonal cell lines can be derived within 2-3 weeks.
[0281] Shalem et al. described a new way to interrogate gene function on a genome-wide scale. Their studies showed that delivery of a genome-scale CRISPR-Cas9 knockout (GeCKO) library targeted 18,080 genes with 64,751 unique guide sequences enabled both negative and positive selection screening in human cells. First, the authors showed use of the GeCKO library to identify genes essential for cell viability in cancer and pluripotent stem cells. Next, in a melanoma model, the authors screened for genes whose loss is involved in resistance to vemurafenib, a therapeutic that inhibits mutant protein kinase BRAF. Their studies showed that the highest-ranking candidates included previously validated genes NF1 and MED12 as well as novel hits NF2, CUL3, TADA2B, and TADA1. The authors observed a high level of consistency between independent guide RNAs targeting the same gene and a high rate of hit confirmation, and thus demonstrated the promise of genome-scale screening with Cas9.
[0282] Nishimasu et al. reported the crystal structure of Streptococcus pyogenes Cas9 in complex with sgRNA and its target DNA at 2.5 A° resolution. The structure revealed a bilobed architecture composed of target recognition and nuclease lobes, accommodating the sgRNA:DNA heteroduplex in a positively charged groove at their interface. Whereas the recognition lobe is essential for binding sgRNA and DNA, the nuclease lobe contains the HNH and RuvC nuclease domains, which are properly positioned for cleavage of the complementary and non-complementary strands of the target DNA, respectively. The nuclease lobe also contains a carboxyl-terminal domain responsible for the interaction with the protospacer adjacent motif (PAM). This high-resolution structure and accompanying functional analyses have revealed the molecular mechanism of RNA-guided DNA targeting by Cas9, thus paving the way for the rational design of new, versatile genome-editing technologies.
[0283] Wu et al. mapped genome-wide binding sites of a catalytically inactive Cas9 (dCas9) from Streptococcus pyogenes loaded with single guide RNAs (sgRNAs) in mouse embryonic stem cells (mESCs). The authors showed that each of the four sgRNAs tested targets dCas9 to between tens and thousands of genomic sites, frequently characterized by a 5-nucleotide seed region in the sgRNA and an NGG protospacer adjacent motif (PAM). Chromatin inaccessibility decreases dCas9 binding to other sites with matching seed sequences; thus 70% of off-target sites are associated with genes. The authors showed that targeted sequencing of 295 dCas9 binding sites in mESCs transfected with catalytically active Cas9 identified only one site mutated above background levels. The authors proposed a two-state model for Cas9 binding and cleavage, in which a seed match triggers binding but extensive pairing with target DNA is required for cleavage.
[0284] Platt et al. established a Cre-dependent Cas9 knockin mouse. The authors demonstrated in vivo as well as ex vivo genome editing using adeno-associated virus (AAV)-, lentivirus-, or particle-mediated delivery of guide RNA in neurons, immune cells, and endothelial cells.
[0285] Hsu et al. (2014) is a review article that discusses generally CRISPR-Cas9 history from yogurt to genome editing, including genetic screening of cells.
[0286] Wang et al. (2014) relates to a pooled, loss-of-function genetic screening approach suitable for both positive and negative selection that uses a genome-scale lentiviral single guide RNA (sgRNA) library.
[0287] Doench et al. created a pool of sgRNAs, tiling across all possible target sites of a panel of six endogenous mouse and three endogenous human genes and quantitatively assessed their ability to produce null alleles of their target gene by antibody staining and flow cytometry. The authors showed that optimization of the PAM improved activity and also provided an on-line tool for designing sgRNAs.
[0288] Swiech et al. demonstrate that AAV-mediated SpCas9 genome editing can enable reverse genetic studies of gene function in the brain.
[0289] Konermann et al. (2015) discusses the ability to attach multiple effector domains, e.g., transcriptional activator, functional and epigenomic regulators at appropriate positions on the guide such as stem or tetraloop with and without linkers.
[0290] Zetsche et al. demonstrates that the Cas9 enzyme can be split into two and hence the assembly of Cas9 for activation can be controlled.
[0291] Chen et al. relates to multiplex screening by demonstrating that a genome-wide in vivo CRISPR-Cas9 screen in mice reveals genes regulating lung metastasis.
[0292] Ran et al. (2015) relates to SaCas9 and its ability to edit genomes and demonstrates that one cannot extrapolate from biochemical assays. Shalem et al. (2015) described ways in which catalytically inactive Cas9 (dCas9) fusions are used to synthetically repress (CRISPRi) or activate (CRISPRa) expression, showing. advances using Cas9 for genome-scale screens, including arrayed and pooled screens, knockout approaches that inactivate genomic loci and strategies that modulate transcriptional activity. End Edits
[0293] Shalem et al. (2015) described ways in which catalytically inactive Cas9 (dCas9) fusions are used to synthetically repress (CRISPRi) or activate (CRISPRa) expression, showing. advances using Cas9 for genome-scale screens, including arrayed and pooled screens, knockout approaches that inactivate genomic loci and strategies that modulate transcriptional activity.
[0294] Xu et al. (2015) assessed the DNA sequence features that contribute to single guide RNA (sgRNA) efficiency in CRISPR-based screens. The authors explored efficiency of CRISPR/Cas9 knockout and nucleotide preference at the cleavage site. The authors also found that the sequence preference for CRISPRi/a is substantially different from that for CRISPR/Cas9 knockout.
[0295] Parnas et al. (2015) introduced genome-wide pooled CRISPR-Cas9 libraries into dendritic cells (DCs) to identify genes that control the induction of tumor necrosis factor (Tnf) by bacterial lipopolysaccharide (LPS). Known regulators of Tlr4 signaling and previously unknown candidates were identified and classified into three functional modules with distinct effects on the canonical responses to LPS.
[0296] Ramanan et al (2015) demonstrated cleavage of viral episomal DNA (cccDNA) in infected cells. The HBV genome exists in the nuclei of infected hepatocytes as a 3.2 kb double-stranded episomal DNA species called covalently closed circular DNA (cccDNA), which is a key component in the HBV life cycle whose replication is not inhibited by current therapies. The authors showed that sgRNAs specifically targeting highly conserved regions of HBV robustly suppresses viral replication and depleted cccDNA.
[0297] Nishimasu et al. (2015) reported the crystal structures of SaCas9 in complex with a single guide RNA (sgRNA) and its double-stranded DNA targets, containing the 5′-TTGAAT-3′ PAM and the 5′-TTGGGT-3′ PAM. A structural comparison of SaCas9 with SpCas9 highlighted both structural conservation and divergence, explaining their distinct PAM specificities and orthologous sgRNA recognition.

[0298] Also, “Dimeric CRISPR RNA-guided FokI nucleases for highly specific genome editing”, Shengdar Q. Tsai, Nicolas Wyvekens, Cyd Khayter, Jennifer A. Foden, Vishal Thapar, Deepak Reyon, Mathew J. Goodwin, Martin J. Aryee, J. Keith Joung Nature Biotechnology 32(6): 569-77 (2014), relates to dimeric RNA-guided FokI Nucleases that recognize extended sequences and can edit endogenous genes with high efficiencies in human cells. In addition, mention is made of PCT application PCT/US14/70057, Attorney Reference 47627.99.2060 and BI-2013/107 entitled “DELIVERY, USE AND THERAPEUTIC APPLICATIONS OF THE CRISPR-CAS SYSTEMS AND COMPOSITIONS FOR TARGETING DISORDERS AND DISEASES USING PARTICLE DELIVERY COMPONENTS (claiming priority from one or more or all of US provisional patent applications: 62/054,490, filed Sep. 24, 2014; 62/010,441, filed Jun. 10, 2014; and 61/915,118, 61/915,215 and 61/915,148, each filed on Dec. 12, 2013) (“the Particle Delivery PCT”), incorporated herein by reference, with respect to a method of preparing an sgRNA-and-Cas9 protein containing particle comprising admixing a mixture comprising an sgRNA and Cas9 protein (and optionally HDR template) with a mixture comprising or consisting essentially of or consisting of surfactant, phospholipid, biodegradable polymer, lipoprotein and alcohol; and particles from such a process. For example, wherein Cas9 protein and sgRNA were mixed together at a suitable, e.g., 3:1 to 1:3 or 2:1 to 1:2 or 1:1 molar ratio, at a suitable temperature, e.g., 15-30C, e.g., 20-25C, e.g., room temperature, for a suitable time, e.g., 15-45, such as 30 minutes, advantageously in sterile, nuclease free buffer, e.g., 1×PBS. Separately, particle components such as or comprising: a surfactant, e.g., cationic lipid, e.g., 1,2-dioleoyl-3-trimethylammonium-propane (DOTAP); phospholipid, e.g., dimyristoylphosphatidylcholine (DMPC); biodegradable polymer, such as an ethylene-glycol polymer or PEG, and a lipoprotein, such as a low-density lipoprotein, e.g., cholesterol were dissolved in an alcohol, advantageously a C₁₋₆ alkyl alcohol, such as methanol, ethanol, isopropanol, e.g., 100% ethanol. The two solutions were mixed together to form particles containing the Cas9-sgRNA complexes. Accordingly, sgRNA may be pre-complexed with the Cas9 protein, before formulating the entire complex in a particle. Formulations may be made with a different molar ratio of different components known to promote delivery of nucleic acids into cells (e.g. 1,2-dioleoyl-3-trimethylammonium-propane (DOTAP), 1,2-ditetradecanoyl-sn-glycero-3-phosphocholine (DMPC), polyethylene glycol (PEG), and cholesterol) For example DOTAP:DMPC:PEG:Cholesterol Molar Ratios may be DOTAP 100, DMPC 0, PEG 0, Cholesterol 0; or DOTAP 90, DMPC 0, PEG 10, Cholesterol 0; or DOTAP 90, DMPC 0, PEG 5, Cholesterol 5. DOTAP 100, DMPC 0, PEG 0, Cholesterol 0. That application accordingly comprehends admixing sgRNA, Cas9 protein and components that form a particle; as well as particles from such admixing. Aspects of the instant invention can involve particles; for example, particles using a process analogous to that of the Particle Delivery PCT, e.g., by admixing a mixture comprising crRNA and/or CRISPR-Cas as in the instant invention and components that form a particle, e.g., as in the Particle Delivery PCT, to form a particle and particles from such admixing (or, of course, other particles involving crRNA and/or CRISPR-Cas as in the instant invention).

### Guide Sequences

[0299] In embodiments of the invention the terms guide sequence and guide RNA and crRNA are used interchangeably as in foregoing cited documents such as WO 2014/093622 (PCT/US2013/074667). In general, a guide sequence is any polynucleotide sequence having sufficient complementarity with a target polynucleotide sequence to hybridize with the target sequence and direct sequence-specific binding of a CRISPR complex to the target sequence. In some embodiments, the degree of complementarity between a guide sequence and its corresponding target sequence, when optimally aligned using a suitable alignment algorithm, is about or more than about 50%, 60%, 75%, 80%, 85%, 90%, 95%, 97.5%, 99%, or more. Optimal alignment may be determined with the use of any suitable algorithm for aligning sequences, non-limiting example of which include the Smith-Waterman algorithm, the Needleman-Wunsch algorithm, algorithms based on the Burrows-Wheeler Transform (e.g., the Burrows Wheeler Aligner), ClustalW, Clustal X, BLAT, Novoalign (Novocraft Technologies; available at www.novocraft.com), ELAND (Illumina, San Diego, Calif.), SOAP (available at soap.genomics.org.cn), and Maq (available at maq.sourceforge.net). In some embodiments, a guide sequence is about or more than about 5, 10, 11, 12, 13, 14, 15, 16, 17, 18, 19, 20, 21, 22, 23, 24, 25, 26, 27, 28, 29, 30, 35, 40, 45, 50, 75, or more nucleotides in length. In some embodiments, a guide sequence is less than about 75, 50, 45, 40, 35, 30, 25, 20, 15, 12, or fewer nucleotides in length. Preferably the guide sequence is 10-30 nucleotides long, such as 30 nucleotides long. The ability of a guide sequence to direct sequence-specific binding of a CRISPR complex to a target sequence may be assessed by any suitable assay. For example, the components of a CRISPR system sufficient to form a CRISPR complex, including the guide sequence to be tested, may be provided to a host cell having the corresponding target sequence, such as by transfection with vectors encoding the components of the CRISPR sequence, followed by an assessment of preferential cleavage within the target sequence, such as by Surveyor assay as described herein. Similarly, cleavage of a target polynucleotide sequence may be evaluated in a test tube by providing the target sequence, components of a CRISPR complex, including the guide sequence to be tested and a control guide sequence different from the test guide sequence, and comparing binding or rate of cleavage at the target sequence between the test and control guide sequence reactions. Other assays are possible, and will occur to those skilled in the art. A guide sequence may be selected to target any target sequence. In some embodiments, the target sequence is a sequence within a genome of a cell. Exemplary target sequences include those that are unique in the target genome.

[0300] In general, and throughout this specification, the term “vector” refers to a nucleic acid molecule capable of transporting another nucleic acid to which it has been linked. Vectors include, but are not limited to, nucleic acid molecules that are single-stranded, double-stranded, or partially double-stranded; nucleic acid molecules that comprise one or more free ends, no free ends (e.g., circular); nucleic acid molecules that comprise DNA, RNA, or both; and other varieties of polynucleotides known in the art. One type of vector is a “plasmid,” which refers to a circular double stranded DNA loop into which additional DNA segments can be inserted, such as by standard molecular cloning techniques. Another type of vector is a viral vector, wherein virally-derived DNA or RNA sequences are present in the vector for packaging into a virus (e.g., retroviruses, replication defective retroviruses, adenoviruses, replication defective adenoviruses, and adeno-associated viruses). Viral vectors also include polynucleotides carried by a virus for transfection into a host cell. Certain vectors are capable of autonomous replication in a host cell into which they are introduced (e.g., bacterial vectors having a bacterial origin of replication and episomal mammalian vectors). Other vectors (e.g., non-episomal mammalian vectors) are integrated into the genome of a host cell upon introduction into the host cell, and thereby are replicated along with the host genome. Moreover, certain vectors are capable of directing the expression of genes to which they are operatively-linked. Such vectors are referred to herein as “expression vectors.” Vectors for and that result in expression in a eukaryotic cell can be referred to herein as “eukaryotic expression vectors.” Common expression vectors of utility in recombinant DNA techniques are often in the form of plasmids.

[0301] Recombinant expression vectors can comprise a nucleic acid of the invention in a form suitable for expression of the nucleic acid in a host cell, which means that the recombinant expression vectors include one or more regulatory elements, which may be selected on the basis of the host cells to be used for expression, that is operatively-linked to the nucleic acid sequence to be expressed. Within a recombinant expression vector, “operably linked” is intended to mean that the nucleotide sequence of interest is linked to the regulatory element(s) in a manner that allows for expression of the nucleotide sequence (e.g., in an in vitro transcription/translation system or in a host cell when the vector is introduced into the host cell).

[0302] The term “regulatory element” is intended to include promoters, enhancers, internal ribosomal entry sites (IRES), and other expression control elements (e.g., transcription termination signals, such as polyadenylation signals and poly-U sequences). Such regulatory elements are described, for example, in Goeddel, GENE EXPRESSION TECHNOLOGY: METHODS IN ENZYMOLOGY 185, Academic Press, San Diego, Calif. (1990). Regulatory elements include those that direct constitutive expression of a nucleotide sequence in many types of host cell and those that direct expression of the nucleotide sequence only in certain host cells (e.g., tissue-specific regulatory sequences). A tissue-specific promoter may direct expression primarily in a desired tissue of interest, such as muscle, neuron, bone, skin, blood, specific organs (e.g., liver, pancreas), or particular cell types (e.g., lymphocytes). Regulatory elements may also direct expression in a temporal-dependent manner, such as in a cell-cycle dependent or developmental stage-dependent manner, which may or may not also be tissue or cell-type specific. In some embodiments, a vector comprises one or more pol III promoter (e.g., 1, 2, 3, 4, 5, or more pol III promoters), one or more pol II promoters (e.g., 1, 2, 3, 4, 5, or more pol II promoters), one or more pol I promoters (e.g., 1, 2, 3, 4, 5, or more pol I promoters), or combinations thereof. Examples of pol III promoters include, but are not limited to, U6 and H1 promoters. Examples of pol II promoters include, but are not limited to, the retroviral Rous sarcoma virus (RSV) LTR promoter (optionally with the RSV enhancer), the cytomegalovirus (CMV) promoter (optionally with the CMV enhancer) [see, e.g., Boshart et al, Cell, 41:521-530 (1985)], the SV40 promoter, the dihydrofolate reductase promoter, the β-actin promoter, the phosphoglycerol kinase (PGK) promoter, and the EF1α promoter. Also encompassed by the term “regulatory element” are enhancer elements, such as WPRE; CMV enhancers; the R-U5′ segment in LTR of HTLV-I (Mol. Cell. Biol., Vol. 8(1), p. 466-472, 1988); SV40 enhancer; and the intron sequence between exons 2 and 3 of rabbit β-globin (Proc. Natl. Acad. Sci. USA., Vol. 78(3), p. 1527-31, 1981). It will be appreciated by those skilled in the art that the design of the expression vector can depend on such factors as the choice of the host cell to be transformed, the level of expression desired, etc. A vector can be introduced into host cells to thereby produce transcripts, proteins, or peptides, including fusion proteins or peptides, encoded by nucleic acids as described herein (e.g., clustered regularly interspersed short palindromic repeats (CRISPR) transcripts, proteins, enzymes, mutant forms thereof, fusion proteins thereof, etc.).

[0303] Advantageous vectors include lentiviruses and adeno-associated viruses, and types of such vectors can also be selected for targeting particular types of cells.

[0304] As used herein, the term “crRNA” or “guide RNA” or “single guide RNA” or “sgRNA” or “one or more nucleic acid components” of a Type VI CRISPR-Cas locus effector protein comprises any polynucleotide sequence having sufficient complementarity with a target nucleic acid sequence to hybridize with the target nucleic acid sequence and direct sequence-specific binding of a RNA-targeting complex to the target RNA sequence.

[0305] In certain embodiments, the CRISPR system as provided herein can make use of a crRNA or analogous polynucleotide comprising a guide sequence, wherein the polynucleotide is an RNA, a DNA or a mixture of RNA and DNA, and/or wherein the polynucleotide comprises one or more nucleotide analogs. The sequence can comprise any structure, including but not limited to a structure of a native crRNA, such as a bulge, a hairpin or a stem loop structure. In certain embodiments, the polynucleotide comprising the guide sequence forms a duplex with a second polynucleotide sequence which can be an RNA or a DNA sequence.

[0306] In certain embodiments, guides of the invention comprise non-naturally occurring nucleic acids and/or non-naturally occurring nucleotides and/or nucleotide analogs, and/or chemically modifications. Non-naturally occurring nucleic acids can include, for example, mixtures of naturally and non-naturally occurring nucleotides. Non-naturally occurring nucleotides and/or nucleotide analogs may be modified at the ribose, phosphate, and/or base moiety. In an embodiment of the invention, a guide nucleic acid comprises ribonucleotides and non-ribonucleotides. In one such embodiment, a guide comprises one or more ribonucleotides and one or more deoxyribonucleotides. In an embodiment of the invention, the guide comprises one or more non-naturally occurring nucleotide or nucleotide analog such as a nucleotide with phosphorothioate linkage, boranophosphate linkage, a locked nucleic acid (LNA) nucleotides comprising a methylene bridge between the 2′ and 4′ carbons of the ribose ring, or bridged nucleic acids (BNA). Other examples of modified nucleotides include 2′-O-methyl analogs, 2′-deoxy analogs, 2-thiouridine analogs, N6-methyladenosine analogs, or 2′-fluoro analogs. Further examples of modified bases include, but are not limited to, 2-aminopurine, 5-bromo-uridine, pseudouridine (Ψ), N1-methylpseudouridine (melΨ), 5-methoxyuridine (5moU), inosine, 7-methylguanosine. Examples of guide RNA chemical modifications include, without limitation, incorporation of 2′-O-methyl (M), 2′-O-methyl 3′phosphorothioate (MS), S-constrained ethyl (cEt), or 2′-O-methyl 3′thioPACE (MSP) at one or more terminal nucleotides. Such chemically modified guide RNAs can comprise increased stability and increased activity as compared to unmodified guide RNAs, though on-target vs. off-target specificity is not predictable. (See, Hendel, 2015, Nat Biotechnol. 33(9):985-9, doi: 10.1038/nbt.3290, published online 29 Jun. 2015; Allerson et al., J. Med. Chem. 2005, 48:901-904; Bramsen et al., Front. Genet., 2012, 3:154; Deng et al., PNAS, 2015, 112:11870-11875; Sharma et al., MedChemComm., 2014, 5:1454-1471; Li et al., Nature Biomedical Engineering, 2017, 1, 0066 DOI:10.1038/s41551-017-0066).

[0307] In some embodiments, the 5′ and/or 3′ end of a guide RNA is modified by a variety of functional moieties including fluorescent dyes, polyethylene glycol, cholesterol, proteins, or detection tags. (See Kelly et al., 2016, J. Biotech. 233:74-83). In certain embodiments, a guide comprises ribonucleotides in a region that binds to a target DNA and one or more deoxyribonucleotides and/or nucleotide analogs in a region that binds to Cas9, Cpf1, or C2c1. In an embodiment of the invention, deoxyribonucleotides and/or nucleotide analogs are incorporated in engineered guide structures, such as, without limitation, 5′ and/or 3′ end, stem-loop regions, and the seed region. In certain embodiments, the modification is not in the 5′-handle of the stem-loop regions. Chemical modification in the 5′-handle of the stem-loop region of a guide may abolish its function (see Li, et al., Nature Biomedical Engineering, 2017, 1:0066). In certain embodiments, at least 1, 2, 3, 4, 5, 6, 7, 8, 9, 10, 11, 12, 13, 14, 15, 16, 17, 18, 19, 20, 21, 22, 23, 24, 25, 26, 27, 28, 29, 30, 35, 40, 45, 50, or 75 nucleotides of a guide is chemically modified. In some embodiments, 3-5 nucleotides at either the 3′ or the 5′ end of a guide is chemically modified. In some embodiments, only minor modifications are introduced in the seed region, such as 2′-F modifications. In some embodiments, 2′-F modification is introduced at the 3′ end of a guide. In certain embodiments, three to five nucleotides at the 5′ and/or the 3′ end of the guide are chemically modified with 2′-O-methyl (M), 2′-O-methyl-3′-phosphorothioate (MS), S-constrained ethyl(cEt), or 2′-O-methyl-3′-thioPACE (MSP). Such modification can enhance genome editing efficiency (see Hendel et al., Nat. Biotechnol. (2015) 33(9): 985-989). In certain embodiments, all of the phosphodiester bonds of a guide are substituted with phosphorothioates (PS) for enhancing levels of gene disruption. In certain embodiments, more than five nucleotides at the 5′ and/or the 3′ end of the guide are chemically modified with 2′-O-Me, 2′-F or S-constrained ethyl(cEt). Such chemically modified guide can mediate enhanced levels of gene disruption (see Ragdarm et al., 0215, PNAS, E7110-E7111). In an embodiment of the invention, a guide is modified to comprise a chemical moiety at its 3′ and/or 5′ end. Such moieties include, but are not limited to amine, azide, alkyne, thio, dibenzocyclooctyne (DBCO), or Rhodamine. In certain embodiment, the chemical moiety is conjugated to the guide by a linker, such as an alkyl chain. In certain embodiments, the chemical moiety of the modified guide can be used to attach the guide to another molecule, such as DNA, RNA, protein, or nanoparticles. Such chemically modified guide can be used to identify or enrich cells generically edited by a CRISPR system (see Lee et al., eLife, 2017, 6:e25312, DOI:10.7554)

[0308] In some embodiments, the modification to the guide is a chemical modification, an insertion, a deletion or a split. In some embodiments, the chemical modification includes, but is not limited to, incorporation of 2′-O-methyl (M) analogs, 2′-deoxy analogs, 2-thiouridine analogs, N6-methyladenosine analogs, 2′-fluoro analogs, 2-aminopurine, 5-bromo-uridine, pseudouridine (Ψ), N1-methylpseudouridine (melΨ), 5-methoxyuridine (5moU), inosine, 7-methylguanosine, 2′-O-methyl-3′-phosphorothioate (MS), S-constrained ethyl(cEt), phosphorothioate (PS), or 2′-O-methyl-3′-thioPACE (MSP). In some embodiments, the guide comprises one or more of phosphorothioate modifications. In certain embodiments, at least 1, 2, 3, 4, 5, 6, 7, 8, 9, 10, 11, 12, 13, 14, 15, 16, 17, 18, 19, 20, or 25 nucleotides of the guide are chemically modified. In certain embodiments, one or more nucleotides in the seed region are chemically modified. In certain embodiments, one or more nucleotides in the 3′-terminus are chemically modified. In certain embodiments, none of the nucleotides in the 5′-handle is chemically modified. In some embodiments, the chemical modification in the seed region is a minor modification, such as incorporation of a 2′-fluoro analog. In a specific embodiment, one nucleotide of the seed region is replaced with a 2′-fluoro analog. In some embodiments, 5 or 10 nucleotides in the 3′-terminus are chemically modified. Such chemical modifications at the 3′-terminus of the Cpf1 CrRNA improve gene cutting efficiency (see Li, et al., Nature Biomedical Engineering, 2017, 1:0066). In a specific embodiment, 5 nucleotides in the 3′-terminus are replaced with 2′-fluoro analogues. In a specific embodiment, 10 nucleotides in the 3′-terminus are replaced with 2′-fluoro analogues. In a specific embodiment, 5 nucleotides in the 3′-terminus are replaced with 2′-O-methyl (M) analogs.

[0309] In some embodiments, the loop of the 5′-handle of the guide is modified. In some embodiments, the loop of the 5′-handle of the guide is modified to have a deletion, an insertion, a split, or chemical modifications. In certain embodiments, the loop comprises 3, 4, or 5 nucleotides. In certain embodiments, the loop comprises the sequence of UCUU, UUUU, UAUU, or UGUU.

[0310] In one aspect, the guide comprises portions that are chemically linked or conjugated via a non-phosphodiester bond. In one aspect, the guide comprises, in non-limiting examples, direct repeat sequence portion and a targeting sequence portion that are chemically linked or conjugated via a non-nucleotide loop. In some embodiments, the portions are joined via a non-phosphodiester covalent linker. Examples of the covalent linker include but are not limited to a chemical moiety selected from the group consisting of carbamates, ethers, esters, amides, imines, amidines, aminotrizines, hydrozone, disulfides, thioethers, thioesters, phosphorothioates, phosphorodithioates, sulfonamides, sulfonates, fulfones, sulfoxides, ureas, thioureas, hydrazide, oxime, triazole, photolabile linkages, C—C bond forming groups such as Diels-Alder cyclo-addition pairs or ring-closing metathesis pairs, and Michael reaction pairs.

[0311] In some embodiments, portions of the guide are first synthesized using the standard phosphoramidite synthetic protocol (Herdewijn, P., ed., Methods in Molecular Biology Col 288, Oligonucleotide Synthesis: Methods and Applications, Humana Press, New Jersey (2012)). In some embodiments, the non-targeting guide portions can be functionalized to contain an appropriate functional group for ligation using the standard protocol known in the art (Hermanson, G. T., Bioconjugate Techniques, Academic Press (2013)). Examples of functional groups include, but are not limited to, hydroxyl, amine, carboxylic acid, carboxylic acid halide, carboxylic acid active ester, aldehyde, carbonyl, chlorocarbonyl, imidazolylcarbonyl, hydrozide, semicarbazide, thio semicarbazide, thiol, maleimide, haloalkyl, sufonyl, ally, propargyl, diene, alkyne, and azide. Once a non-targeting portions of a guide is functionalized, a covalent chemical bond or linkage can be formed between the two oligonucleotides. Examples of chemical bonds include, but are not limited to, those based on carbamates, ethers, esters, amides, imines, amidines, aminotrizines, hydrozone, disulfides, thioethers, thioesters, phosphorothioates, phosphorodithioates, sulfonamides, sulfonates, fulfones, sulfoxides, ureas, thioureas, hydrazide, oxime, triazole, photolabile linkages, C—C bond forming groups such as Diels-Alder cyclo-addition pairs or ring-closing metathesis pairs, and Michael reaction pairs.

[0312] In some embodiments, one or more portions of a guide can be chemically synthesized. In some embodiments, the chemical synthesis uses automated, solid-phase oligonucleotide synthesis machines with 2′-acetoxyethyl orthoester (2′-ACE) (Scaringe et al., J. Am. Chem. Soc. (1998) 120: 11820-11821; Scaringe, Methods Enzymol. (2000) 317: 3-18) or 2′-thionocarbamate (2′-TC) chemistry (Dellinger et al., J. Am. Chem. Soc. (2011) 133: 11540-11546; Hendel et al., Nat. Biotechnol. (2015) 33:985-989).

[0313] In some embodiments, the guide portions can be covalently linked using various bioconjugation reactions, loops, bridges, and non-nucleotide links via modifications of sugar, internucleotide phosphodiester bonds, purine and pyrimidine residues. Sletten et al., Angew. Chem. Int. Ed. (2009) 48:6974-6998; Manoharan, M. Curr. Opin. Chem. Biol. (2004) 8: 570-9; Behlke et al., Oligonucleotides (2008) 18: 305-19; Watts, et al., Drug. Discov. Today (2008) 13: 842-55; Shukla, et al., ChemMedChem (2010) 5: 328-49.

[0314] In some embodiments, the guide portions can be covalently linked using click chemistry. In some embodiments, guide portions can be covalently linked using a triazole linker. In some embodiments, guide portions can be covalently linked using Huisgen 1,3-dipolar cycloaddition reaction involving an alkyne and azide to yield a highly stable triazole linker (He et al., ChemBioChem (2015) 17: 1809-1812; WO 2016/186745). In some embodiments, guide portions are covalently linked by ligating a 5′-hexyne portion and a 3′-azide portion. In some embodiments, either or both of the 5′-hexyne guide portion and a 3′-azide guide portion can be protected with 2′-acetoxyethl orthoester (2′-ACE) group, which can be subsequently removed using Dharmacon protocol (Scaringe et al., J. Am. Chem. Soc. (1998) 120: 11820-11821; Scaringe, Methods Enzymol. (2000) 317: 3-18).

[0315] In some embodiments, guide portions can be covalently linked via a linker (e.g., a non-nucleotide loop) that comprises a moiety such as spacers, attachments, bioconjugates, chromophores, reporter groups, dye labeled RNAs, and non-naturally occurring nucleotide analogues. More specifically, suitable spacers for purposes of this invention include, but are not limited to, polyethers (e.g., polyethylene glycols, polyalcohols, polypropylene glycol or mixtures of ethylene and propylene glycols), polyamines group (e.g., spennine, spermidine and polymeric derivatives thereof), polyesters (e.g., poly(ethyl acrylate)), polyphosphodiesters, alkylenes, and combinations thereof. Suitable attachments include any moiety that can be added to the linker to add additional properties to the linker, such as but not limited to, fluorescent labels. Suitable bioconjugates include, but are not limited to, peptides, glycosides, lipids, cholesterol, phospholipids, diacyl glycerols and dialkyl glycerols, fatty acids, hydrocarbons, enzyme substrates, steroids, biotin, digoxigenin, carbohydrates, polysaccharides. Suitable chromophores, reporter groups, and dye-labeled RNAs include, but are not limited to, fluorescent dyes such as fluorescein and rhodamine, chemiluminescent, electrochemiluminescent, and bioluminescent marker compounds. The design of example linkers conjugating two RNA components are also described in WO 2004/015075.

[0316] The linker (e.g., a non-nucleotide loop) can be of any length. In some embodiments, the linker has a length equivalent to about 0-16 nucleotides. In some embodiments, the linker has a length equivalent to about 0-8 nucleotides. In some embodiments, the linker has a length equivalent to about 0-4 nucleotides. In some embodiments, the linker has a length equivalent to about 2 nucleotides. Example linker design is also described in WO2011/008730.

[0317] In some embodiments, the degree of complementarity, when optimally aligned using a suitable alignment algorithm, is about or more than about 50%, 60%, 75%, 80%, 85%, 90%, 95%, 97.5%, 99%, or more. Optimal alignment may be determined with the use of any suitable algorithm for aligning sequences, non-limiting example of which include the Smith-Waterman algorithm, the Needleman-Wunsch algorithm, algorithms based on the Burrows-Wheeler Transform (e.g., the Burrows Wheeler Aligner), ClustalW, Clustal X, BLAT, Novoalign (Novocraft Technologies; available at www.novocraft.com), ELAND (Illumina, San Diego, Calif.), SOAP (available at soap.genomics.org.cn), and Maq (available at maq.sourceforge.net). The ability of a guide sequence (within a RNA-targeting guide RNA or crRNA) to direct sequence-specific binding of a nucleic acid-targeting complex to a target nucleic acid sequence may be assessed by any suitable assay. For example, the components of a RNA-targeting CRISPR-Cas system sufficient to form a nucleic acid-targeting complex, including the guide sequence to be tested, may be provided to a host cell having the corresponding target nucleic acid sequence, such as by transfection with vectors encoding the components of the nucleic acid-targeting complex, followed by an assessment of preferential targeting (e.g., cleavage) within the target nucleic acid sequence, such as by Surveyor assay as described herein. Similarly, cleavage of a target nucleic acid sequence may be evaluated in a test tube by providing the target nucleic acid sequence, components of a nucleic acid-targeting complex, including the guide sequence to be tested and a control guide sequence different from the test guide sequence, and comparing binding or rate of cleavage at the target sequence between the test and control guide sequence reactions. Other assays are possible, and will occur to those skilled in the art. A guide sequence, and hence a RNA-targeting guide RNA or crRNA may be selected to target any target nucleic acid sequence. The target sequence may be DNA. The target sequence may be any RNA sequence. In some embodiments, the target sequence may be a sequence within a RNA molecule selected from the group consisting of messenger RNA (mRNA), pre-mRNA, ribosomal RNA (rRNA), transfer RNA (tRNA), micro-RNA (miRNA), small interfering RNA (siRNA), small nuclear RNA (snRNA), small nucleolar RNA (snoRNA), double stranded RNA (dsRNA), non-coding RNA (ncRNA), long non-coding RNA (lncRNA), and small cytoplasmatic RNA (scRNA). In some preferred embodiments, the target sequence may be a sequence within a RNA molecule selected from the group consisting of mRNA, pre-mRNA, and rRNA. In some preferred embodiments, the target sequence may be a sequence within a RNA molecule selected from the group consisting of ncRNA, and lncRNA. In some more preferred embodiments, the target sequence may be a sequence within an mRNA molecule or a pre-mRNA molecule.

[0318] In some embodiments, a RNA-targeting guide RNA or crRNA is selected to reduce the degree secondary structure within the RNA-targeting guide RNA or crRNA. In some embodiments, about or less than about 75%, 50%, 40%, 30%, 25%, 20%, 15%, 10%, 5%, 1%, or fewer of the nucleotides of the RNA-targeting guide RNA participate in self-complementary base pairing when optimally folded. Optimal folding may be determined by any suitable polynucleotide folding algorithm. Some programs are based on calculating the minimal Gibbs free energy. An example of one such algorithm is mFold, as described by Zuker and Stiegler (Nucleic Acids Res. 9 (1981), 133-148). Another example folding algorithm is the online webserver RNAfold, developed at Institute for Theoretical Chemistry at the University of Vienna, using the centroid structure prediction algorithm (see e.g., A. R. Gruber et al., 2008, Cell 106(1): 23-24; and P A Carr and G M Church, 2009, Nature Biotechnology 27(12): 1151-62).

[0319] In some embodiments, a nucleic acid-targeting guide is designed or selected to modulate intermolecular interactions among guide molecules, such as among stem-loop regions of different guide molecules. It will be appreciated that nucleotides within a guide that base-pair to form a stem-loop are also capable of base-pairing to form an intermolecular duplex with a second guide and that such an intermolecular duplex would not have a secondary structure compatible with CRISPR complex formation. Accordingly, is useful to select or design DR sequences in order to modulate stem-loop formation and CRISPR complex formation. In some embodiments, about or less than about 75%, 50%, 40%, 30%, 25%, 20%, 15%, 10%, 5%, 1%, or fewer of nucleic acid-targeting guides are in intermolecular duplexes. It will be appreciated that stem-loop variation will often be within limits imposed by DR-CRISPR effector interactions. One way to modulate stem-loop formation or change the equilibrium between stem-loop and intermolecular duplex is to vary nucleotide pairs in the stem of the stem-loop of a DR. For example, in one embodiment, a G-C pair is replaced by an A-U or U-A pair. In another embodiment, an A-U pair is substituted for a G-C or a C-G pair. In another embodiment, a naturally occurring nucleotide is replaced by a nucleotide analog. Another way to modulate stem-loop formation or change the equilibrium between stem-loop and intermolecular duplex is to modify the loop of the stem-loop of a DR. Without be bound by theory, the loop can be viewed as an intervening sequence flanked by two sequences that are complementary to each other. When that intervening sequence is not self-complementary, its effect will be to destabilize intermolecular duplex formation. The same principle applies when guides are multiplexed: while the targeting sequences may differ, it may be advantageous to modify the stem-loop region in the DRs of the different guides. Moreover, when guides are multiplexed, the relative activities of the different guides can be modulated by balancing the activity of each individual guide. In certain embodiments, the equilibrium between intermolecular stem-loops vs. intermolecular duplexes is determined. The determination may be made by physical or biochemical means and can be in the presence or absence of a CRISPR effector.

[0320] In certain embodiments, a guide RNA or crRNA may comprise, consist essentially of, or consist of a direct repeat (DR) sequence and a guide sequence or spacer sequence. In certain embodiments, the guide RNA or crRNA may comprise, consist essentially of, or consist of a direct repeat sequence fused or linked to a guide sequence or spacer sequence. In certain embodiments, the direct repeat sequence may be located upstream (i.e., 5′) from the guide sequence or spacer sequence. In other embodiments, the direct repeat sequence may be located downstream (i.e., 3′) from the guide sequence or spacer sequence. In other embodiments, multiple DRs (such as dual DRs) may be present.

[0321] In certain embodiments, the crRNA comprises a stem loop, preferably a single stem loop. In certain embodiments, the direct repeat sequence forms a stem loop, preferably a single stem loop.

[0322] In certain embodiments, the spacer length of the guide RNA is from 15 to 35 nt. In certain embodiments, the spacer length of the guide RNA is at least 15 nucleotides. In certain embodiments, the spacer length is from 15 to 17 nt, e.g., 15, 16, or 17 nt, from 17 to 20 nt, e.g., 17, 18, 19, or 20 nt, from 20 to 24 nt, e.g., 20, 21, 22, 23, or 24 nt, from 23 to 25 nt, e.g., 23, 24, or 25 nt, from 24 to 27 nt, e.g., 24, 25, 26, or 27 nt, from 27-30 nt, e.g., 27, 28, 29, or 30 nt, from 30-35 nt, e.g., 30, 31, 32, 33, 34, or 35 nt, or 35 nt or longer.

[0323] The “tracrRNA” sequence or analogous terms includes any polynucleotide sequence that has sufficient complementarity with a crRNA sequence to hybridize. In general, degree of complementarity is with reference to the optimal alignment of the sca sequence and tracr sequence, along the length of the shorter of the two sequences. Optimal alignment may be determined by any suitable alignment algorithm, and may further account for secondary structures, such as self-complementarity within either the sca sequence or tracr sequence. In some embodiments, the degree of complementarity between the tracr sequence and sca sequence along the length of the shorter of the two when optimally aligned is about or more than about 25%, 30%, 40%, 50%, 60%, 70%, 80%, 90%, 95%, 97.5%, 99%, or higher. In certain embodiments, the tracrRNA may not be required. Indeed, the CRISPR-Cas effector protein from Bergeyella zoohelcum and orthologs thereof do not require a tracrRNA to ensure cleavage of an RNA target.

[0324] In further detail, the assay is as follows for a RNA target, provided that a PAM sequence is required to direct recognition. Two E. coli strains are used in this assay. One carries a plasmid that encodes the endogenous effector protein locus from the bacterial strain. The other strain carries an empty plasmid (e.g. pACYC184, control strain). All possible 7 or 8 bp PAM sequences are presented on an antibiotic resistance plasmid (pUC19 with ampicillin resistance gene). The PAM is located next to the sequence of proto-spacer 1 (the RNA target to the first spacer in the endogenous effector protein locus). Two PAM libraries were cloned. One has a 8 random bp 5′ of the proto-spacer (e.g. total of 65536 different PAM sequences=complexity). The other library has 7 random bp 3′ of the proto-spacer (e.g. total complexity is 16384 different PAMs). Both libraries were cloned to have in average 500 plasmids per possible PAM. Test strain and control strain were transformed with 5′PAM and 3′PAM library in separate transformations and transformed cells were plated separately on ampicillin plates. Recognition and subsequent cutting/interference with the plasmid renders a cell vulnerable to ampicillin and prevents growth. Approximately 12 h after transformation, all colonies formed by the test and control strains where harvested and plasmid RNA was isolated. Plasmid RNA was used as template for PCR amplification and subsequent deep sequencing. Representation of all PAMs in the untransformed libraries showed the expected representation of PAMs in transformed cells. Representation of all PAMs found in control strains showed the actual representation. Representation of all PAMs in test strain showed which PAMs are not recognized by the enzyme and comparison to the control strain allows extracting the sequence of the depleted PAM. In particular embodiments, the cleavage, such as the RNA cleavage is not PAM dependent. Indeed, for the Bergeyella zoohelcum Cas13b effector protein and its orthologs, RNA target cleavage appears to be PAM independent, and hence the Table 1 Cas13b of the invention may act in a PAM independent fashion.

[0325] For minimization of toxicity and off-target effect, it will be important to control the concentration of RNA-targeting guide RNA delivered. Optimal concentrations of nucleic acid-targeting guide RNA can be determined by testing different concentrations in a cellular or non-human eukaryote animal model and using deep sequencing the analyze the extent of modification at potential off-target genomic loci. The concentration that gives the highest level of on-target modification while minimizing the level of off-target modification should be chosen for in vivo delivery. The RNA-targeting system is derived advantageously from a CRISPR-Cas system. In some embodiments, one or more elements of a RNA-targeting system is derived from a particular organism comprising an endogenous RNA-targeting system of a Tables 1-4 Cas13 effector protein system as herein-discussed.

### Dead Guide Sequence

[0326] In one aspect, the invention provides guide sequences which are modified in a manner which allows for formation of the CRISPR Cas complex and successful binding to the target, while at the same time, not either allowing for or not allowing for successful nuclease activity (i.e. without nuclease activity/without indel activity). For matters of explanation such modified guide sequences are referred to as “dead guides” or “dead guide sequences”. These dead guides or dead guide sequences can be thought of as catalytically inactive or conformationally inactive with regard to nuclease activity. Indeed, dead guide sequences may not sufficiently engage in productive base pairing with respect to the ability to promote catalytic activity or to distinguish on-target and off-target binding activity. Briefly, the assay involves synthesizing a CRISPR target RNA and guide RNAs comprising mismatches with the target RNA, combining these with the RNA targeting enzyme and analyzing cleavage based on gels based on the presence of bands generated by cleavage products, and quantifying cleavage based upon relative band intensities.

[0327] Hence, in a related aspect, the invention provides a non-naturally occurring or engineered composition RNA targeting CRISPR-Cas system comprising a functional RNA targeting enzyme as described herein, and guide RNA (gRNA) or crRNA wherein the gRNA or crRNA comprises a dead guide sequence whereby the gRNA is capable of hybridizing to a target sequence such that the RNA targeting CRISPR-Cas system is directed to a genomic locus of interest in a cell without detectable RNA cleavage activity of a non-mutant RNA targeting enzyme of the system. It is to be understood that any of the gRNAs or crRNAs according to the invention as described herein elsewhere may be used as dead gRNAs/crRNAs comprising a dead guide sequence.

[0328] The ability of a dead guide sequence to direct sequence-specific binding of a CRISPR complex to an RNA target sequence may be assessed by any suitable assay. For example, the components of a CRISPR-Cas system sufficient to form a CRISPR-Cas complex, including the dead guide sequence to be tested, may be provided to a host cell having the corresponding target sequence, such as by transfection with vectors encoding the components of the system, followed by an assessment of preferential cleavage within the target sequence.

[0329] As explained further herein, several structural parameters allow for a proper framework to arrive at such dead guides. Dead guide sequences can be typically shorter than respective guide sequences which result in active RNA cleavage. In particular embodiments, dead guides are 5%, 10%, 20%, 30%, 40%, 50%, shorter than respective guides directed to the same.

[0330] As explained below and known in the art, one aspect of gRNA or crRNA-RNA targeting specificity is the direct repeat sequence, which is to be appropriately linked to such guides. In particular, this implies that the direct repeat sequences are designed dependent on the origin of the RNA targeting enzyme. Structural data available for validated dead guide sequences may be used for designing CRISPR-Cas specific equivalents. Structural similarity between, e.g., the orthologous nuclease domains HEPN of two or more CRISPR-Cas effector proteins may be used to transfer design equivalent dead guides. Thus, the dead guide herein may be appropriately modified in length and sequence to reflect such CRISPR-Cas specific equivalents, allowing for formation of the CRISPR-Cas complex and successful binding to the target RNA, while at the same time, not allowing for successful nuclease activity.

[0331] Dead guides allow one to use gRNA or crRNA as a means for gene targeting, without the consequence of nuclease activity, while at the same time providing directed means for activation or repression. Guide RNA or crRNA comprising a dead guide may be modified to further include elements in a manner which allow for activation or repression of gene activity, in particular protein adaptors (e.g. aptamers) as described herein elsewhere allowing for functional placement of gene effectors (e.g. activators or repressors of gene activity). One example is the incorporation of aptamers, as explained herein and in the state of the art. By engineering the gRNA or crRNA comprising a dead guide to incorporate protein-interacting aptamers (Konermann et al., “Genome-scale transcription activation by an engineered CRISPR-Cas9 complex,” doi:10.1038/nature14136, incorporated herein by reference), one may assemble multiple distinct effector domains. Such may be modeled after natural processes.

### Cas13 in General

[0332] The instant invention provides particular Cas13 effectors, nucleic acids, systems, vectors, and methods of use. The features and functions of Cas13 may also be the features and functions of other CRISPR-Cas proteins described herein.

[0333] As used herein, the terms Cas13b-s1 accessory protein, Cas13b-s1 protein, Cas13b-s1, Csx27, and Csx27 protein are used interchangeably and the terms Cas13b-s2 accessory protein, Cas13b-s2 protein, Cas13b-S2, Csx28, and Csx28 protein are used interchangeably.

[0334] In particular embodiments, the wildtype Cas13 effector protein has RNA binding and cleaving function.

[0335] In particular embodiments, the (wild type or mutated) Cas13 effector protein may have RNA and/or DNA cleaving function, preferably RNA cleaving function. In these embodiments, methods may be provided based on the effector proteins provided herein which comprehend inducing one or more mutations in a eukaryotic cell (in vitro, i.e. in an isolated eukaryotic cell) as herein discussed comprising delivering to cell a vector as herein discussed. The mutation(s) can include the introduction, deletion, or substitution of one or more nucleotides at each target sequence of cell(s) via the guide(s) RNA(s) or sgRNA(s) or crRNA(s). The mutations can include the introduction, deletion, or substitution of 1-75 nucleotides at each target sequence of said cell(s) via the guide(s) RNA(s) or sgRNA(s) or crRNA(s). The mutations can include the introduction, deletion, or substitution of 1, 5, 10, 11, 12, 13, 14, 15, 16, 17, 18, 19, 20, 21, 22, 23, 24, 25, 26, 27, 28, 29, 30, 35, 40, 45, 50, or 75 nucleotides at each target sequence of said cell(s) via the guide(s) RNA(s) or sgRNA(s) or crRNA(s). The mutations can include the introduction, deletion, or substitution of 5, 10, 11, 12, 13, 14, 15, 16, 17, 18, 19, 20, 21, 22, 23, 24, 25, 26, 27, 28, 29, 30, 35, 40, 45, 50, or 75 nucleotides at each target sequence of said cell(s) via the guide(s) RNA(s) or sgRNA(s) or crRNA(s). The mutations include the introduction, deletion, or substitution of 10, 11, 12, 13, 14, 15, 16, 17, 18, 19, 20, 21, 22, 23, 24, 25, 26, 27, 28, 29, 30, 35, 40, 45, 50, or 75 nucleotides at each target sequence of said cell(s) via the guide(s) RNA(s) or sgRNA(s) or crRNA(s). The mutations can include the introduction, deletion, or substitution of 20, 21, 22, 23, 24, 25, 26, 27, 28, 29, 30, 35, 40, 45, 50, or 75 nucleotides at each target sequence of said cell(s) via the guide(s) RNA(s) or sgRNA(s) or crRNA(s). The mutations can include the introduction, deletion, or substitution of 40, 45, 50, 75, 100, 200, 300, 400 or 500 nucleotides at each target sequence of said cell(s) via the guide(s) RNA(s) or sgRNA(s) or crRNAs.

[0336] For minimization of toxicity and off-target effect, it will be important to control the concentration of Cas13 mRNA and guide RNA delivered. Optimal concentrations of Cas13 mRNA and guide RNA can be determined by testing different concentrations in a cellular or non-human eukaryote animal model and using deep sequencing the analyze the extent of modification at potential off-target genomic loci. Guide sequences and strategies to minimize toxicity and off-target effects can be as in WO 2014/093622 (PCT/US2013/074667); or, via mutation as herein.

[0337] The nucleic acid molecule encoding a Cas13 is advantageously codon optimized. An example of a codon optimized sequence, is in this instance a sequence optimized for expression in a eukaryote, e.g., humans (i.e. being optimized for expression in humans), or for another eukaryote, animal or mammal as herein discussed; see, e.g., SaCas9 human codon optimized sequence in WO 2014/093622 (PCT/US2013/074667). Whilst this is preferred, it will be appreciated that other examples are possible and codon optimization for a host species other than human, or for codon optimization for specific organs is known. In some embodiments, an enzyme coding sequence encoding a Cas is codon optimized for expression in particular cells, such as eukaryotic cells. The eukaryotic cells may be those of or derived from a particular organism, such as a mammal, including but not limited to human, or non-human eukaryote or animal or mammal as herein discussed, e.g., mouse, rat, rabbit, dog, livestock, or non-human mammal or primate. In some embodiments, processes for modifying the germ line genetic identity of human beings and/or processes for modifying the genetic identity of animals which are likely to cause them suffering without any substantial medical benefit to man or animal, and also animals resulting from such processes, may be excluded. In general, codon optimization refers to a process of modifying a nucleic acid sequence for enhanced expression in the host cells of interest by replacing at least one codon (e.g. about or more than about 1, 2, 3, 4, 5, 10, 15, 20, 25, 50, or more codons) of the native sequence with codons that are more frequently or most frequently used in the genes of that host cell while maintaining the native amino acid sequence. Various species exhibit particular bias for certain codons of a particular amino acid. Codon bias (differences in codon usage between organisms) often correlates with the efficiency of translation of messenger RNA (mRNA), which is in turn believed to be dependent on, among other things, the properties of the codons being translated and the availability of particular transfer RNA (tRNA) molecules. The predominance of selected tRNAs in a cell is generally a reflection of the codons used most frequently in peptide synthesis. Accordingly, genes can be tailored for optimal gene expression in a given organism based on codon optimization. Codon usage tables are readily available, for example, at the “Codon Usage Database” available at www.kazusa.orjp/codon/ and these tables can be adapted in a number of ways. See Nakamura, Y., et al. “Codon usage tabulated from the international DNA sequence databases: status for the year 2000” Nucl. Acids Res. 28:292 (2000). Computer algorithms for codon optimizing a particular sequence for expression in a particular host cell are also available, such as Gene Forge (Aptagen; Jacobus, Pa.), are also available. In some embodiments, one or more codons (e.g. 1, 2, 3, 4, 5, 10, 15, 20, 25, 50, or more, or all codons) in a sequence encoding a Cas correspond to the most frequently used codon for a particular amino acid.

[0338] In some embodiments, the unmodified RNA-targeting effector protein (Cas13) may have cleavage activity. In some embodiments, Cas13 may direct cleavage of one or two nucleic acid strands at the location of or near a target sequence, such as within the target sequence and/or within the complement of the target sequence or at sequences associated with the target sequence, e.g., within about 1, 2, 3, 4, 5, 6, 7, 8, 9, 10, 15, 20, 25, 50, 100, 200, 500, or more base pairs from the first or last nucleotide of a target sequence. In some embodiments, the Cas13 protein may direct more than one cleavage (such as one, two three, four, five, or more cleavages) of one or two strands within the target sequence and/or within the complement of the target sequence or at sequences associated with the target sequence and/or within about 1, 2, 3, 4, 5, 6, 7, 8, 9, 10, 15, 20, 25, 50, 100, 200, 500, or more base pairs from the first or last nucleotide of a target sequence. In some embodiments, the cleavage may be blunt, i.e., generating blunt ends. In some embodiments, the cleavage may be staggered, i.e., generating sticky ends. In some embodiments, a vector encodes a nucleic acid-targeting Cas13 protein that may be mutated with respect to a corresponding wild-type enzyme such that the mutated nucleic acid-targeting Cas13 protein lacks the ability to cleave one or two strands of a target polynucleotide containing a target sequence, e.g., alteration or mutation in a HEPN domain to produce a mutated Cas13 substantially lacking all RNA cleavage activity, e.g., the RNA cleavage activity of the mutated enzyme is about no more than 25%, 10%, 5%, 1%, 0.1%, 0.01%, or less of the nucleic acid cleavage activity of the non-mutated form of the enzyme; an example can be when the nucleic acid cleavage activity of the mutated form is nil or negligible as compared with the non-mutated form. By derived, Applicants mean that the derived enzyme is largely based, in the sense of having a high degree of sequence homology with, a wildtype enzyme, but that it has been mutated (modified) in some way as known in the art or as described herein.

[0339] Typically, in the context of an endogenous RNA-targeting system, formation of a RNA-targeting complex (comprising a guide RNA or crRNA hybridized to a target sequence and complexed with one or more RNA-targeting effector proteins) results in cleavage of RNA strand(s) in or near (e.g., within 1, 2, 3, 4, 5, 6, 7, 8, 9, 10, 20, 50, or more base pairs from) the target sequence. As used herein the term “sequence(s) associated with a target locus of interest” refers to sequences near the vicinity of the target sequence (e.g. within 1, 2, 3, 4, 5, 6, 7, 8, 9, 10, 20, 50, or more base pairs from the target sequence, wherein the target sequence is comprised within a target locus of interest).

[0340] An example of a codon optimized sequence, is in this instance a sequence optimized for expression in a eukaryote, e.g., humans (i.e. being optimized for expression in humans), or for another eukaryote, animal or mammal as herein discussed; see, e.g., SaCas9 human codon optimized sequence in WO 2014/093622 (PCT/US2013/074667) as an example of a codon optimized sequence (from knowledge in the art and this disclosure, codon optimizing coding nucleic acid molecule(s), especially as to effector protein (e.g., Cas13) is within the ambit of the skilled artisan). Whilst this is preferred, it will be appreciated that other examples are possible and codon optimization for a host species other than human, or for codon optimization for specific organs is known. In some embodiments, an enzyme coding sequence encoding a RNA-targeting Cas13 protein is codon optimized for expression in particular cells, such as eukaryotic cells. The eukaryotic cells may be those of or derived from a particular organism, such as a mammal, including but not limited to human, or non-human eukaryote or animal or mammal as herein discussed, e.g., mouse, rat, rabbit, dog, livestock, or non-human mammal or primate. In some embodiments, processes for modifying the germ line genetic identity of human beings and/or processes for modifying the genetic identity of animals which are likely to cause them suffering without any substantial medical benefit to man or animal, and also animals resulting from such processes, may be excluded. In general, codon optimization refers to a process of modifying a nucleic acid sequence for enhanced expression in the host cells of interest by replacing at least one codon (e.g., about or more than about 1, 2, 3, 4, 5, 10, 15, 20, 25, 50, or more codons) of the native sequence with codons that are more frequently or most frequently used in the genes of that host cell while maintaining the native amino acid sequence. Various species exhibit particular bias for certain codons of a particular amino acid. Codon bias (differences in codon usage between organisms) often correlates with the efficiency of translation of messenger RNA (mRNA), which is in turn believed to be dependent on, among other things, the properties of the codons being translated and the availability of particular transfer RNA (tRNA) molecules. The predominance of selected tRNAs in a cell is generally a reflection of the codons used most frequently in peptide synthesis. Accordingly, genes can be tailored for optimal gene expression in a given organism based on codon optimization. Codon usage tables are readily available, for example, at the “Codon Usage Database” available at www.kazusa.orjp/codon/ and these tables can be adapted in a number of ways. See Nakamura, Y., et al. “Codon usage tabulated from the international DNA sequence databases: status for the year 2000” Nucl. Acids Res. 28:292 (2000). Computer algorithms for codon optimizing a particular sequence for expression in a particular host cell are also available, such as Gene Forge (Aptagen; Jacobus, Pa.), are also available. In some embodiments, one or more codons (e.g., 1, 2, 3, 4, 5, 10, 15, 20, 25, 50, or more, or all codons) in a sequence encoding a DNA/RNA-targeting Cas protein corresponds to the most frequently used codon for a particular amino acid.

[0341] The (i) Cas13 or nucleic acid molecule(s) encoding it or (ii) crRNA can be delivered separately; and advantageously at least one or both of one of (i) and (ii), e.g., an assembled complex is delivered via a particle or nanoparticle complex. RNA-targeting effector protein mRNA can be delivered prior to the RNA-targeting guide RNA or crRNA to give time for nucleic acid-targeting effector protein to be expressed. RNA-targeting effector protein (Cas13) mRNA might be administered 1-12 hours (preferably around 2-6 hours) prior to the administration of RNA-targeting guide RNA or crRNA. Alternatively, RNA-targeting effector protein mRNA and RNA-targeting guide RNA or crRNA can be administered together. Advantageously, a second booster dose of guide RNA or crRNA can be administered 1-12 hours (preferably around 2-6 hours) after the initial administration of RNA-targeting effector (Cas13) protein mRNA+guide RNA. Additional administrations of RNA-targeting effector protein mRNA and/or guide RNA or crRNA might be useful to achieve the most efficient levels of genome modification.

[0342] In one aspect, the invention provides methods for using one or more elements of a RNA-targeting system. The RNA-targeting complex of the invention provides an effective means for modifying a target RNA single or double stranded, linear or super-coiled. The RNA-targeting complex of the invention has a wide variety of utility including modifying (e.g., deleting, inserting, translocating, inactivating, activating) a target RNA in a multiplicity of cell types. As such the RNA-targeting complex of the invention has a broad spectrum of applications in, e.g., gene therapy, drug screening, disease diagnosis, and prognosis. An exemplary RNA-targeting complex comprises a RNA-targeting effector protein complexed with a guide RNA or crRNA hybridized to a target sequence within the target locus of interest.

[0343] In one embodiment, this invention provides a method of cleaving a target RNA. The method may comprise modifying a target RNA using a RNA-targeting complex that binds to the target RNA and effect cleavage of said target RNA. In an embodiment, the RNA-targeting complex of the invention, when introduced into a cell, may create a break (e.g., a single or a double strand break) in the RNA sequence. For example, the method can be used to cleave a disease RNA in a cell. For example, an exogenous RNA template comprising a sequence to be integrated flanked by an upstream sequence and a downstream sequence may be introduced into a cell. The upstream and downstream sequences share sequence similarity with either side of the site of integration in the RNA. Where desired, a donor RNA can be mRNA. The exogenous RNA template comprises a sequence to be integrated (e.g., a mutated RNA). The sequence for integration may be a sequence endogenous or exogenous to the cell. Examples of a sequence to be integrated include RNA encoding a protein or a non-coding RNA (e.g., a microRNA). Thus, the sequence for integration may be operably linked to an appropriate control sequence or sequences. Alternatively, the sequence to be integrated may provide a regulatory function. The upstream and downstream sequences in the exogenous RNA template are selected to promote recombination between the RNA sequence of interest and the donor RNA. The upstream sequence is a RNA sequence that shares sequence similarity with the RNA sequence upstream of the targeted site for integration. Similarly, the downstream sequence is a RNA sequence that shares sequence similarity with the RNA sequence downstream of the targeted site of integration. The upstream and downstream sequences in the exogenous RNA template can have 75%, 80%, 85%, 90%, 95%, or 100% sequence identity with the targeted RNA sequence. Preferably, the upstream and downstream sequences in the exogenous RNA template have about 95%, 96%, 97%, 98%, 99%, or 100% sequence identity with the targeted RNA sequence. In some methods, the upstream and downstream sequences in the exogenous RNA template have about 99% or 100% sequence identity with the targeted RNA sequence. An upstream or downstream sequence may comprise from about 20 bp to about 2500 bp, for example, about 50, 100, 200, 300, 400, 500, 600, 700, 800, 900, 1000, 1100, 1200, 1300, 1400, 1500, 1600, 1700, 1800, 1900, 2000, 2100, 2200, 2300, 2400, or 2500 bp. In some methods, the exemplary upstream or downstream sequence have about 200 bp to about 2000 bp, about 600 bp to about 1000 bp, or more particularly about 700 bp to about 1000 bp. In some methods, the exogenous RNA template may further comprise a marker. Such a marker may make it easy to screen for targeted integrations. Examples of suitable markers include restriction sites, fluorescent proteins, or selectable markers. The exogenous RNA template of the invention can be constructed using recombinant techniques (see, for example, Sambrook et al., 2001 and Ausubel et al., 1996). In a method for modifying a target RNA by integrating an exogenous RNA template, a break (e.g., double or single stranded break in double or single stranded RNA) is introduced into the RNA sequence by the nucleic acid-targeting complex, the break is repaired via homologous recombination with an exogenous RNA template such that the template is integrated into the RNA target. The presence of a double-stranded break facilitates integration of the template. In other embodiments, this invention provides a method of modifying expression of a RNA in a eukaryotic cell. The method comprises increasing or decreasing expression of a target polynucleotide by using a nucleic acid-targeting complex that binds to the DNA or RNA (e.g., mRNA or pre-mRNA). In some methods, a target RNA can be inactivated to affect the modification of the expression in a cell. For example, upon the binding of a RNA-targeting complex to a target sequence in a cell, the target RNA is inactivated such that the sequence is not translated, the coded protein is not produced, or the sequence does not function as the wild-type sequence does. For example, a protein or microRNA coding sequence may be inactivated such that the protein or microRNA or pre-microRNA transcript is not produced. The target RNA of a RNA-targeting complex can be any RNA endogenous or exogenous to the eukaryotic cell. For example, the target RNA can be a RNA residing in the nucleus of the eukaryotic cell. The target RNA can be a sequence (e.g., mRNA or pre-mRNA) coding a gene product (e.g., a protein) or a non-coding sequence (e.g., ncRNA, lncRNA, tRNA, or rRNA). Examples of target RNA include a sequence associated with a signaling biochemical pathway, e.g., a signaling biochemical pathway-associated RNA. Examples of target RNA include a disease associated RNA. A “disease-associated” RNA refers to any RNA which is yielding translation products at an abnormal level or in an abnormal form in cells derived from a disease-affected tissues compared with tissues or cells of a non disease control. It may be a RNA transcribed from a gene that becomes expressed at an abnormally high level; it may be a RNA transcribed from a gene that becomes expressed at an abnormally low level, where the altered expression correlates with the occurrence and/or progression of the disease. A disease-associated RNA also refers to a RNA transcribed from a gene possessing mutation(s) or genetic variation that is directly responsible or is in linkage disequilibrium with a gene(s) that is responsible for the etiology of a disease. The translated products may be known or unknown, and may be at a normal or abnormal level. The target RNA of a RNA-targeting complex can be any RNA endogenous or exogenous to the eukaryotic cell. For example, the target RNA can be a RNA residing in the nucleus of the eukaryotic cell. The target RNA can be a sequence (e.g., mRNA or pre-mRNA) coding a gene product (e.g., a protein) or a non-coding sequence (e.g., ncRNA, lncRNA, tRNA, or rRNA).

[0344] In some embodiments, the method may comprise allowing a RNA-targeting complex to bind to the target RNA to effect cleavage of said target RNA thereby modifying the target RNA, wherein the RNA-targeting complex comprises a nucleic acid-targeting effector (Cas13) protein complexed with a guide RNA or crRNA hybridized to a target sequence within said target RNA. In one aspect, the invention provides a method of modifying expression of RNA in a eukaryotic cell. In some embodiments, the method comprises allowing a RNA-targeting complex to bind to the RNA such that said binding results in increased or decreased expression of said RNA; wherein the RNA-targeting complex comprises a nucleic acid-targeting effector (Cas13) protein complexed with a guide RNA. Methods of modifying a target RNA can be in a eukaryotic cell, which may be in vivo, ex vivo or in vitro. In some embodiments, the method comprises sampling a cell or population of cells from a human or non-human animal, and modifying the cell or cells. Culturing may occur at any stage ex vivo. The cell or cells may even be re-introduced into the non-human animal or plant. For re-introduced cells it is particularly preferred that the cells are stem cells.

[0345] The use of two different aptamers (each associated with a distinct RNA-targeting guide RNAs) allows an activator-adaptor protein fusion and a repressor-adaptor protein fusion to be used, with different RNA-targeting guide RNAs or crRNAs, to activate expression of RNA, whilst repressing another. They, along with their different guide RNAs or crRNAs can be administered together, or substantially together, in a multiplexed approach. A large number of such modified RNA-targeting guide RNAs or crRNAs can be used all at the same time, for example 10 or 20 or 30 and so forth, whilst only one (or at least a minimal number) of effector protein (Cas13) molecules need to be delivered, as a comparatively small number of effector protein molecules can be used with a large number of modified guides. The adaptor protein may be associated (preferably linked or fused to) one or more activators or one or more repressors. For example, the adaptor protein may be associated with a first activator and a second activator. The first and second activators may be the same, but they are preferably different activators. Three or more or even four or more activators (or repressors) may be used, but package size may limit the number being higher than 5 different functional domains. Linkers are preferably used, over a direct fusion to the adaptor protein, where two or more functional domains are associated with the adaptor protein. Suitable linkers might include the GlySer linker.

[0346] It is also envisaged that the RNA-targeting effector protein-guide RNA complex as a whole may be associated with two or more functional domains. For example, there may be two or more functional domains associated with the RNA-targeting effector protein, or there may be two or more functional domains associated with the guide RNA or crRNA (via one or more adaptor proteins), or there may be one or more functional domains associated with the RNA-targeting effector protein and one or more functional domains associated with the guide RNA or crRNA (via one or more adaptor proteins).

[0347] The fusion between the adaptor protein and the activator or repressor may include a linker. For example, GlySer linkers GGGS can be used. They can be used in repeats of 3 ((GGGGS)₃ (SEQ ID NO:79)) or 6, 9 or even 12 or more, to provide suitable lengths, as required. Linkers can be used between the guide RNAs and the functional domain (activator or repressor), or between the nucleic acid-targeting effector protein and the functional domain (activator or repressor). The linkers the user to engineer appropriate amounts of “mechanical flexibility”.

[0348] CRISPR effector (Cas13) protein or mRNA therefor (or more generally a nucleic acid molecule therefor) and guide RNA or crRNA might also be delivered separately e.g., the former 1-12 hours (preferably around 2-6 hours) prior to the administration of guide RNA or crRNA, or together. A second booster dose of guide RNA or crRNA can be administered 1-12 hours (preferably around 2-6 hours) after the initial administration.

[0349] The Cas13 effector protein is sometimes referred to herein as a CRISPR Enzyme. It will be appreciated that the effector protein is based on or derived from an enzyme, so the term ‘effector protein’ certainly includes ‘enzyme’ in some embodiments. However, it will also be appreciated that the effector protein may, as required in some embodiments, have DNA or RNA binding, but not necessarily cutting or nicking, activity, including a dead-Cas effector protein function.

[0350] Cellular targets include Hemopoietic Stem/Progenitor Cells (CD34+); Human T cells; and Eye (retinal cells)—for example photoreceptor precursor cells.

[0351] Inventive methods can further comprise delivery of templates. Delivery of templates may be via the cotemporaneous or separate from delivery of any or all the CRISPR effector protein (Cas13) or guide or crRNA and via the same delivery mechanism or different.

[0352] In certain embodiments, the methods as described herein may comprise providing a Cas13 transgenic cell in which one or more nucleic acids encoding one or more guide RNAs are provided or introduced operably connected in the cell with a regulatory element comprising a promoter of one or more gene of interest. As used herein, the term “Cas13 transgenic cell” refers to a cell, such as a eukaryotic cell, in which a Cas13 gene has been genomically integrated. The nature, type, or origin of the cell are not particularly limiting according to the present invention. Also the way how the Cas13 transgene is introduced in the cell is may vary and can be any method as is known in the art. In certain embodiments, the Cas13 transgenic cell is obtained by introducing the Cas13 transgene in an isolated cell. In certain other embodiments, the Cas13 transgenic cell is obtained by isolating cells from a Cas13 transgenic organism. By means of example, and without limitation, the Cas13 transgenic cell as referred to herein may be derived from a Cas13 transgenic eukaryote, such as a Cas13 knock-in eukaryote. Reference is made to WO 2014/093622 (PCT/US13/74667), incorporated herein by reference. Methods of US Patent Publication Nos. 20120017290 and 20110265198 assigned to Sangamo BioSciences, Inc. directed to targeting the Rosa locus may be modified to utilize the CRISPR Cas system of the present invention. Methods of US Patent Publication No. 20130236946 assigned to Cellectis directed to targeting the Rosa locus may also be modified to utilize the CRISPR Cas system of the present invention. By means of further example reference is made to Platt et. al. (Cell; 159(2):440-455 (2014)), describing a Cas9 knock-in mouse, which is incorporated herein by reference. The Cas13 transgene can further comprise a Lox-Stop-polyA-Lox(LSL) cassette thereby rendering Cas13 expression inducible by Cre recombinase. Alternatively, the Cas13 transgenic cell may be obtained by introducing the Cas13 transgene in an isolated cell. Delivery systems for transgenes are well known in the art. By means of example, the Cas13 transgene may be delivered in for instance eukaryotic cell by means of vector (e.g., AAV, adenovirus, lentivirus) and/or particle and/or particle delivery, as also described herein elsewhere.

[0353] It will be understood by the skilled person that the cell, such as the Cas13 transgenic cell, as referred to herein may comprise further genomic alterations besides having an integrated Cas13 gene or the mutations arising from the sequence specific action of Cas13 when complexed with RNA capable of guiding Cas13 to a target locus, such as for instance one or more oncogenic mutations, as for instance and without limitation described in Platt et al. (2014), Chen et al., (2014) or Kumar et al. (2009).

[0354] In some embodiments, the Cas13 sequence is fused to one or more nuclear localization sequences (NLSs), such as about or more than about 1, 2, 3, 4, 5, 6, 7, 8, 9, 10, or more NLSs. In some embodiments, the Cas13 comprises about or more than about 1, 2, 3, 4, 5, 6, 7, 8, 9, 10, or more NLSs at or near the amino-terminus, about or more than about 1, 2, 3, 4, 5, 6, 7, 8, 9, 10, or more NLSs at or near the carboxy-terminus, or a combination of these (e.g. zero or at least one or more NLS at the amino-terminus and zero or at one or more NLS at the carboxy terminus). When more than one NLS is present, each may be selected independently of the others, such that a single NLS may be present in more than one copy and/or in combination with one or more other NLSs present in one or more copies. In a preferred embodiment of the invention, the Cas13 comprises at most 6 NLSs. In some embodiments, an NLS is considered near the N- or C-terminus when the nearest amino acid of the NLS is within about 1, 2, 3, 4, 5, 10, 15, 20, 25, 30, 40, 50, or more amino acids along the polypeptide chain from the N- or C-terminus. Non-limiting examples of NLSs include an NLS sequence derived from: the NLS of the SV40 virus large T-antigen, having the amino acid sequence PKKKRKV (SEQ ID NO: 80); the NLS from nucleoplasmin (e.g. the nucleoplasmin bipartite NLS with the sequence KRPAATKKAGQAKKKK) (SEQ ID NO: 81); the c-myc NLS having the amino acid sequence PAAKRVKLD (SEQ ID NO: 82) or RQRRNELKRSP (SEQ ID NO: 83); the hRNPA1 M9 NLS having the sequence NQSSNFGPMKGGNFGGRSSGPYGGGGQYFAKPRNQGGY (SEQ ID NO: 84); the sequence RMRIZFKNKGKDTAELRRRRVEVSVELRKAKKDEQILKRRNV (SEQ ID NO: 85) of the IBB domain from importin-alpha; the sequences VSRKRPRP (SEQ ID NO: 86) and PPKKARED (SEQ ID NO: 87) of the myoma T protein; the sequence POPKKKPL (SEQ ID NO: 88) of human p53; the sequence SALIKKKKKMAP (SEQ ID NO: 89) of mouse c-abl IV; the sequences DRLRR (SEQ ID NO: 90) and PKQKKRK (SEQ ID NO: 91) of the influenza virus NS1; the sequence RKLKKKIKKL (SEQ ID NO: 92) of the Hepatitis virus delta antigen; the sequence REKKKFLKRR (SEQ ID NO: 93) of the mouse Mx1 protein; the sequence KRKGDEVDGVDEVAKKKSKK (SEQ ID NO: 94) of the human poly(ADP-ribose) polymerase; and the sequence RKCLQAGMNLEARKTKK (SEQ ID NO: 95) of the steroid hormone receptors (human) glucocorticoid. In general, the one or more NLSs are of sufficient strength to drive accumulation of the Cas in a detectable amount in the nucleus of a eukaryotic cell. In general, strength of nuclear localization activity may derive from the number of NLSs in the Cas, the particular NLS(s) used, or a combination of these factors. Detection of accumulation in the nucleus may be performed by any suitable technique. For example, a detectable marker may be fused to the Cas, such that location within a cell may be visualized, such as in combination with a means for detecting the location of the nucleus (e.g. a stain specific for the nucleus such as DAPI). Cell nuclei may also be isolated from cells, the contents of which may then be analyzed by any suitable process for detecting protein, such as immunohistochemistry, Western blot, or enzyme activity assay. Accumulation in the nucleus may also be determined indirectly, such as by an assay for the effect of CRISPR complex formation (e.g. assay for DNA cleavage or mutation at the target sequence, or assay for altered gene expression activity affected by CRISPR complex formation and/or Cas enzyme activity), as compared to a control no exposed to the Cas or complex, or exposed to a Cas lacking the one or more NLSs.

[0355] The guide RNA(s), e.g., sgRNA(s) or crRNA(s) encoding sequences and/or Cas13 encoding sequences, can be functionally or operatively linked to regulatory element(s) and hence the regulatory element(s) drive expression. The promoter(s) can be constitutive promoter(s) and/or conditional promoter(s) and/or inducible promoter(s) and/or tissue specific promoter(s). The promoter can be selected from the group consisting of RNA polymerases, pol I, pol II, pol III, T7, U6, H1, retroviral Rous sarcoma virus (RSV) LTR promoter, the cytomegalovirus (CMV) promoter, the SV40 promoter, the dihydrofolate reductase promoter, the β-actin promoter, the phosphoglycerol kinase (PGK) promoter, and the EF1a promoter. An advantageous promoter is the promoter is U6.

[0356] In some embodiments, a CRISPR effector (Cas 13n) protein may form a component of an inducible system. The inducible nature of the system would allow for spatiotemporal control of gene editing or gene expression using a form of energy. The form of energy may include but is not limited to electromagnetic radiation, sound energy, chemical energy and thermal energy. Examples of inducible system include tetracycline inducible promoters (Tet-On or Tet-Off), small molecule two-hybrid transcription activations systems (FKBP, ABA, etc.), or light inducible systems (Phytochrome, LOV domains, or cryptochrome). In one embodiment, the CRISPR effector protein may be a part of a Light Inducible Transcriptional Effector (LITE) to direct changes in transcriptional activity in a sequence-specific manner. The components of a light may include a CRISPR effector protein, a light-responsive cytochrome heterodimer (e.g. from Arabidopsis thaliana), and a transcriptional activation/repression domain. Further examples of inducible DNA binding proteins and methods for their use are provided in U.S. 61/736,465 and U.S. 61/721,283, and WO 2014018423 A2 which is hereby incorporated by reference in its entirety.

[0357] Whenever reference is made herein to Cas13, it will be understood that a mutated Cas13 according to the invention as described herein is meant, unless explicitly indicated otherwise. Whenever reference is made herein to Cas13, preferably a mutated Cas13a, Cas13b, Cas13c, or Cas13d according to the invention as described herein is meant, unless explicitly indicated otherwise. Whenever reference is made herein to Cas13, preferably a mutated Cas13b according to the invention as described herein is meant, unless explicitly indicated otherwise.

[0358] In one aspect, the invention provides a mutated Cas13 as described herein, such as preferably, but without limitation Cas13b as described herein elsewhere, having one or more mutations resulting in reduced off-target effects, i.e. improved CRISPR enzymes for use in effecting modifications to target loci but which reduce or eliminate activity towards off-targets, such as when complexed to guide RNAs, as well as improved CRISPR enzymes for increasing the activity of CRISPR enzymes, such as when complexed with guide RNAs. It is to be understood that mutated enzymes as described herein below may be used in any of the methods according to the invention as described herein elsewhere. Any of the methods, products, compositions and uses as described herein elsewhere are equally applicable with the mutated CRISPR enzymes as further detailed below.

[0359] Slaymaker et al. recently described a method for the generation of Cas9 orthologues with enhanced specificity (Slaymaker et al. 2015 “Rationally engineered Cas9 nucleases with improved specificity”). This strategy can be used to enhance the specificity of the Cas13 protein. Primary residues for mutagenesis are preferably all positive charges residues within the HEPN domain. Additional residues are positive charged residues that are conserved between different orthologues.

[0360] In an aspect, the invention also provides methods and mutations for modulating Cas13 binding activity and/or binding specificity. In certain embodiments Cas13 proteins lacking nuclease activity are used. In certain embodiments, modified guide RNAs are employed that promote binding but not nuclease activity of a Cas13 nuclease. In such embodiments, on-target binding can be increased or decreased. Also, in such embodiments off-target binding can be increased or decreased. Moreover, there can be increased or decreased specificity as to on-target binding vs. off-target binding.

[0361] The methods and mutations which can be employed in various combinations to increase or decrease activity and/or specificity of on-target vs. off-target activity, or increase or decrease binding and/or specificity of on-target vs. off-target binding, can be used to compensate or enhance mutations or modifications made to promote other effects. Such mutations or modifications made to promote other effects in include mutations or modification to the Cas13 and or mutation or modification made to a guide RNA. The methods and mutations of the invention are used to modulate Cas13 nuclease activity and/or binding with chemically modified guide RNAs.

[0362] In an aspect, the invention provides methods and mutations for modulating binding and/or binding specificity of Cas13 proteins according to the invention as defined herein comprising functional domains such as nucleases, transcriptional activators, transcriptional repressors, and the like. For example, a Cas13 protein can be made nuclease-null, or having altered or reduced nuclease activity by introducing mutations such as for instance Cas13 mutations described herein elsewhere. Nuclease deficient Cas13 proteins are useful for RNA-guided target sequence dependent delivery of functional domains. The invention provides methods and mutations for modulating binding of Cas13 proteins. In one embodiment, the functional domain comprises VP64, providing an RNA-guided transcription factor. In another embodiment, the functional domain comprises Fok I, providing an RNA-guided nuclease activity. Mention is made of U.S. Pat. Pub. 2014/0356959, U.S. Pat. Pub. 2014/0342456, U.S. Pat. Pub. 2015/0031132, and Mali, P. et al., 2013, Science 339(6121):823-6, doi: 10.1126/science.1232033, published online 3 Jan. 2013 and through the teachings herein the invention comprehends methods and materials of these documents applied in conjunction with the teachings herein. In certain embodiments, on-target binding is increased. In certain embodiments, off-target binding is decreased. In certain embodiments, on-target binding is decreased. In certain embodiments, off-target binding is increased. Accordingly, the invention also provides for increasing or decreasing specificity of on-target binding vs. off-target binding of functionalized Cas13 binding proteins.

[0363] The use of Cas13 as an RNA-guided binding protein is not limited to nuclease-null Ca13. Cas13 enzymes comprising nuclease activity can also function as RNA-guided binding proteins when used with certain guide RNAs. For example short guide RNAs and guide RNAs comprising nucleotides mismatched to the target can promote RNA directed Cas13 binding to a target sequence with little or no target cleavage. (See, e.g., Dahlman, 2015, Nat Biotechnol. 33(11):1159-1161, doi: 10.1038/nbt.3390, published online 5 Oct. 2015). In an aspect, the invention provides methods and mutations for modulating binding of Cas13 proteins that comprise nuclease activity. In certain embodiments, on-target binding is increased. In certain embodiments, off-target binding is decreased. In certain embodiments, on-target binding is decreased. In certain embodiments, off-target binding is increased. In certain embodiments, there is increased or decreased specificity of on-target binding vs. off-target binding. In certain embodiments, nuclease activity of guide RNA-Cas13 enzyme is also modulated.

[0364] RNA-RNA duplex formation is important for cleavage activity and specificity throughout the target region, not only the seed region sequence closest to the PAM. Thus, truncated guide RNAs show reduced cleavage activity and specificity. In an aspect, the invention provides method and mutations for increasing activity and specificity of cleavage using altered guide RNAs.

[0365] In certain embodiments, the catalytic activity of the CRISPR-Cas protein (e.g., Cas13) of the invention is altered or modified. It is to be understood that mutated Cas13 has an altered or modified catalytic activity if the catalytic activity is different than the catalytic activity of the corresponding wild type CRISPR-Cas protein (e.g., unmutated CRISPR-Cas protein). Catalytic activity can be determined by means known in the art. By means of example, and without limitation, catalytic activity can be determined in vitro or in vivo by determination of indel percentage (for instance after a given time, or at a given dose). In certain embodiments, catalytic activity is increased. In certain embodiments, catalytic activity is increased by at least 5%, preferably at least 10%, more preferably at least 20%, such as at least 30%, at least 40%, at least 50%, at least 60%, at least 70%, at least 80%, at least 90%, or at least 100%. In certain embodiments, catalytic activity is decreased. In certain embodiments, catalytic activity is decreased by at least 5%, preferably at least 10%, more preferably at least 20%, such as at least 30%, at least 40%, at least 50%, at least 60%, at least 70%, at least 80%, at least 90%, or (substantially) 100%. The one or more mutations herein may inactivate the catalytic activity, which may substantially all catalytic activity, below detectable levels, or no measurable catalytic activity.

[0366] One or more characteristics of the engineered CRISPR-Cas protein may be different from a corresponding wiled type CRISPR-Cas protein. Examples of such characteristics include catalytic activity, gRNA binding, specificity of the CRISPR-Cas protein (e.g., specificity of editing a defined target), stability of the CRISPR-Cas protein, off-target binding, target binding, protease activity, nickase activity, PFS recognition. In some examples, a engineered CRISPR-Cas protein may comprise one or more mutations of the corresponding wild type CRISPR-Cas protein. In some embodiments, the catalytic activity of the engineered CRISPR-Cas protein is increased as compared to a corresponding wildtype CRISPR-Cas protein. In some embodiments, the catalytic activity of the engineered CRISPR-Cas protein is decreased as compared to a corresponding wildtype CRISPR-Cas protein. In some embodiments, the gRNA binding of the engineered CRISPR-Cas protein is increased as compared to a corresponding wildtype CRISPR-Cas protein. In some embodiments, the gRNA binding of the engineered CRISPR-Cas protein is decreased as compared to a corresponding wildtype CRISPR-Cas protein. In some embodiments, the specificity of the CRISPR-Cas protein is increased as compared to a corresponding wildtype CRISPR-Cas protein. In some embodiments, the specificity of the CRISPR-Cas protein is decreased as compared to a corresponding wildtype CRISPR-Cas protein. In some embodiments, the stability of the CRISPR-Cas protein is increased as compared to a corresponding wildtype CRISPR-Cas protein. In some embodiments, the stability of the CRISPR-Cas protein is decreased as compared to a corresponding wildtype CRISPR-Cas protein. In some embodiments, the engineered CRISPR-Cas protein further comprises one or more mutations which inactivate catalytic activity. In some embodiments, the off-target binding of the CRISPR-Cas protein is increased as compared to a corresponding wildtype CRISPR-Cas protein. In some embodiments, the off-target binding of the CRISPR-Cas protein is decreased as compared to a corresponding wildtype CRISPR-Cas protein. In some embodiments, the target binding of the CRISPR-Cas protein is increased as compared to a corresponding wildtype CRISPR-Cas protein. In some embodiments, the target binding of the CRISPR-Cas protein is decreased as compared to a corresponding wildtype CRISPR-Cas protein. In some embodiments, the engineered CRISPR-Cas protein has a higher protease activity or polynucleotide-binding capability compared with a corresponding wildtype CRISPR-Cas protein. In some embodiments, the PFS recognition is altered as compared to a corresponding wildtype CRISPR-Cas protein.

[0367] In certain embodiments, the gRNA (crRNA) binding of the Cas13 protein of the invention is altered or modified. It is to be understood that mutated Cas13 has an altered or modified gRNA binding if the gRNA binding is different than the gRNA binding of the corresponding wild type Cas13 (i.e. unmutated Cas13).gRNA binding can be determined by means known in the art. By means of example, and without limitation, gRNA binding can be determined by calculating binding strength or affinity (such as based on equilibrium constants, Ka, Kd, etc). In certain embodiments, gRNA binding is increased. In certain embodiments, gRNA binding is increased by at least 5%, preferably at least 10%, more preferably at least 20%, such as at least 30%, at least 40%, at least 50%, at least 60%, at least 70%, at least 80%, at least 90%, or at least 100%. In certain embodiments, gRNA binding is decreased. In certain embodiments, gRNA binding is decreased by at least 5%, preferably at least 10%, more preferably at least 20%, such as at least 30%, at least 40%, at least 50%, at least 60%, at least 70%, at least 80%, at least 90%, or (substantially) 100%.

[0368] In certain embodiments, the specificity of the Cas13 protein of the invention is altered or modified. It is to be understood that mutated Cas13 has an altered or modified specificity if the specificity is different than the specificity of the corresponding wild type Cas13 (i.e. unmutated Cas13). Specificity can be determined by means known in the art. By means of example, and without limitation, specificity can be determined by comparison of on-target activity and off-target activity. In certain embodiments, specificity is increased. In certain embodiments, specificity is increased by at least 5%, preferably at least 10%, more preferably at least 20%, such as at least 30%, at least 40%, at least 50%, at least 60%, at least 70%, at least 80%, at least 90%, or at least 100%. In certain embodiments, specificity is decreased. In certain embodiments, specificity is decreased by at least 5%, preferably at least 10%, more preferably at least 20%, such as at least 30%, at least 40%, at least 50%, at least 60%, at least 70%, at least 80%, at least 90%, or (substantially) 100%.

[0369] In certain embodiments, the stability of the Cas13 protein of the invention is altered or modified. It is to be understood that mutated Cas13 has an altered or modified stability if the stability is different than the stability of the corresponding wild type Cas13 (i.e. unmutated Cas13). Stability can be determined by means known in the art. By means of example, and without limitation, stability can be determined by determining the half-life of the Cas13 protein. In certain embodiments, stability is increased. In certain embodiments, stability is increased by at least 5%, preferably at least 10%, more preferably at least 20%, such as at least 30%, at least 40%, at least 50%, at least 60%, at least 70%, at least 80%, at least 90%, or at least 100%. In certain embodiments, stability is decreased. In certain embodiments, stability is decreased by at least 5%, preferably at least 10%, more preferably at least 20%, such as at least 30%, at least 40%, at least 50%, at least 60%, at least 70%, at least 80%, at least 90%, or (substantially) 100%.

[0370] In certain embodiments, the target binding of the Cas13 protein of the invention is altered or modified. It is to be understood that mutated Cas13 has an altered or modified target binding if the target binding is different than the target binding of the corresponding wild type Cas13 (i.e. unmutated Cas13). target binding can be determined by means known in the art. By means of example, and without limitation, target binding can be determined by calculating binding strength or affinity (such as based on equilibrium constants, Ka, Kd, etc). In certain embodiments, target bindings increased. In certain embodiments, target binding is increased by at least 5%, preferably at least 10%, more preferably at least 20%, such as at least 30%, at least 40%, at least 50%, at least 60%, at least 70%, at least 80%, at least 90%, or at least 100%. In certain embodiments, target binding is decreased. In certain embodiments, target binding is decreased by at least 5%, preferably at least 10%, more preferably at least 20%, such as at least 30%, at least 40%, at least 50%, at least 60%, at least 70%, at least 80%, at least 90%, or (substantially) 100%.

[0371] In certain embodiments, the off-target binding of the Cas13 protein of the invention is altered or modified. It is to be understood that mutated Cas13 has an altered or modified off-target binding if the off-target binding is different than the off-target binding of the corresponding wild type Cas13 (i.e. unmutated Cas13). Off-target binding can be determined by means known in the art. By means of example, and without limitation, off-target binding can be determined by calculating binding strength or affinity (such as based on equilibrium constants, Ka, Kd, etc). In certain embodiments, off-target bindings increased. In certain embodiments, off-target binding is increased by at least 5%, preferably at least 10%, more preferably at least 20%, such as at least 30%, at least 40%, at least 50%, at least 60%, at least 70%, at least 80%, at least 90%, or at least 100%. In certain embodiments, off-target binding is decreased. In certain embodiments, off-target binding is decreased by at least 5%, preferably at least 10%, more preferably at least 20%, such as at least 30%, at least 40%, at least 50%, at least 60%, at least 70%, at least 80%, at least 90%, or (substantially) 100%.

[0372] In certain embodiments, the PFS (or PAM) recognition or specificity of the Cas13 protein of the invention is altered or modified. It is to be understood that mutated Cas13 has an altered or modified PFS recognition or specificity if the PFS recognition or specificity is different than the PFS recognition or specificity of the corresponding wild type Cas13 (i.e. unmutated Cas13). PFS recognition or specificity can be determined by means known in the art. By means of example, and without limitation, PFS recognition or specificity can be determined by PFS (PAM) screens. In certain embodiments, at least one different PFS is recognized by the Cas13. In certain embodiments, at least one PFS is recognized by the mutated Cas13 which is not recognized by the corresponding wild type Cas13. In certain embodiments, at least one PFS is recognized by the mutated Cas13 which is not recognized by the corresponding wild type Cas13, in addition to the wild type PFS. In certain embodiments, at least one PFS is recognized by the mutated Cas13 which is not recognized by the corresponding wild type Cas13, and the wild type PFS is not anymore recognized. In certain embodiments, the PFS recognized by the mutated Cas13 is longer than the PFS recognized by the wild type Cas13, such as 1, 2, or 3 nucleotides longer. In certain embodiments, the PFS recognized by the mutated Cas13 is shorter than the PFS recognized by the wild type Cas13, such as 1, 2, or 3 nucleotides shorter.

[0373] The invention provides a non-naturally occurring or engineered composition comprising

i) a mutated Cas13 effector protein, and
ii) a crRNA,
wherein the crRNA comprises a) a guide sequence that is capable of hybridizing to a target RNA sequence, and b) a direct repeat sequence,

[0374] whereby there is formed a CRISPR complex comprising the Cas13 effector protein complexed with the guide sequence that is hybridized to the target RNA sequence. The complex can be formed in vitro or ex vivo and introduced into a cell or contacted with RNA; or can be formed in vivo.

[0375] In some embodiments, such as for Cas13b, a non-naturally occurring or engineered composition of the invention may comprise an accessory protein that enhances Type VI-B CRISPR-Cas effector protein activity.

[0376] In certain such embodiments, the accessory protein that enhances Cas13b effector protein activity is a csx28 protein. In such embodiments, the Type VI-B CRISPR-Cas effector protein and the Type VI-B CRISPR-Cas accessory protein may be from the same source or from a different source.

[0377] In some embodiments, a non-naturally occurring or engineered composition of the invention comprises an accessory protein that represses Cas13b effector protein activity.

[0378] In certain such embodiments, the accessory protein that represses Cas13b effector protein activity is a csx27 protein. In such embodiments, the Type VI-B CRISPR-Cas effector protein and the Type VI-B CRISPR-Cas accessory protein may be from the same source or from a different source. In certain embodiments of the invention, the Type VI-B CRISPR-Cas effector protein is from Table 1.

[0379] In some embodiments, a non-naturally occurring or engineered composition of the invention comprises two or more crRNAs.

[0380] In some embodiments, a non-naturally occurring or engineered composition of the invention comprises a guide sequence that hybridizes to a target RNA sequence in a prokaryotic cell.

[0381] In some embodiments, a non-naturally occurring or engineered composition of the invention comprises a guide sequence that hybridizes to a target RNA sequence in a eukaryotic cell.

[0382] In some embodiment, the Cas13 effector protein comprises one or more nuclear localization signals (NLSs).

[0383] In certain embodiments, the Cas13 effector protein of the invention is, or in, or comprises, or consists essentially of, or consists of, or involves or relates to such a protein derived from or as set forth in Tables 1-4, and comprising one or more mutation of the invention as described herein elsewhere.

[0384] In some embodiment of the non-naturally occurring or engineered composition of the invention, the Cas13 effector protein is associated with one or more functional domains. The association can be by direct linkage of the effector protein to the functional domain, or by association with the crRNA. In a non-limiting example, the crRNA comprises an added or inserted sequence that can be associated with a functional domain of interest, including, for example, an aptamer or a nucleotide that binds to a nucleic acid binding adapter protein. The functional domain may be a functional heterologous domain.

[0385] In certain non-limiting embodiments, a non-naturally occurring or engineered composition of the invention comprises a functional domain cleaves the target RNA sequence.

[0386] In certain non-limiting embodiments, the non-naturally occurring or engineered composition of the invention comprises a functional domain that modifies transcription or translation of the target RNA sequence.

[0387] In some embodiment of the composition of the invention, the Cas13 effector protein is associated with one or more functional domains; and the effector protein contains one or more mutations within an HEPN domain, whereby the complex can deliver an epigenetic modifier or a transcriptional or translational activation or repression signal. The complex can be formed in vitro or ex vivo and introduced into a cell or contacted with RNA; or can be formed in vivo.

[0388] In some embodiment of the non-naturally occurring or engineered composition of the invention, the Cas13b effector protein and the accessory protein are from the same organism.

[0389] In some embodiment of the non-naturally occurring or engineered composition of the invention, the Cas13b effector protein and the accessory protein are from different organisms.

[0390] The invention also provides a Type VI CRISPR-Cas vector system, which comprises one or more vectors comprising:

[0391] a first regulatory element operably linked to a nucleotide sequence encoding the Cas13 effector protein, and a second regulatory element operably linked to a nucleotide sequence encoding the crRNA.

[0392] In certain embodiments, the vector system of the invention further comprises a regulatory element operably linked to a nucleotide sequence of a Type VI-B CRISPR-Cas accessory protein.

[0393] When appropriate, the nucleotide sequence encoding the Type VI CRISPR-Cas effector protein (and/or optionally the nucleotide sequence encoding the Type VI-B CRISPR-Cas accessory protein) is codon optimized for expression in a eukaryotic cell.

[0394] In some embodiment of the vector system of the invention, the nucleotide sequences encoding the Cas13 effector protein (and optionally) the accessory protein are codon optimized for expression in a eukaryotic cell.

[0395] In some embodiment, the vector system of the invention comprises in a single vector.

[0396] In some embodiment of the vector system of the invention, the one or more vectors comprise viral vectors.

[0397] In some embodiment of the vector system of the invention, the one or more vectors comprise one or more retroviral, lentiviral, adenoviral, adeno-associated or herpes simplex viral vectors.

[0398] The invention provides a delivery system configured to deliver a Cas13 effector protein and one or more nucleic acid components of a non-naturally occurring or engineered composition comprising

[0399] i) a mutated Cas13 effector protein according to the invention as described herein, and

[0400] ii) a crRNA,

[0401] wherein the crRNA comprises a) a guide sequence that hybridizes to a target RNA sequence in a cell, and b) a direct repeat sequence,

[0402] wherein the Cas13 effector protein forms a complex with the crRNA,

[0403] wherein the guide sequence directs sequence-specific binding to the target RNA sequence,

[0404] whereby there is formed a CRISPR complex comprising the Cas13 effector protein complexed with the guide sequence that is hybridized to the target RNA sequence. The complex can be formed in vitro or ex vivo and introduced into a cell or contacted with RNA; or can be formed in vivo.

[0405] In some embodiment of the delivery system of the invention, the system comprises one or more vectors or one or more polynucleotide molecules, the one or more vectors or polynucleotide molecules comprising one or more polynucleotide molecules encoding the Cas13 effector protein and one or more nucleic acid components of the non-naturally occurring or engineered composition.

[0406] In some embodiment, the delivery system of the invention comprises a delivery vehicle comprising liposome(s), particle(s), exosome(s), microvesicle(s), a gene-gun or one or more viral vector(s).

[0407] In some embodiment, the non-naturally occurring or engineered composition of the invention is for use in a therapeutic method of treatment or in a research program.

[0408] In some embodiment, the non-naturally occurring or engineered vector system of the invention is for use in a therapeutic method of treatment or in a research program.

[0409] In some embodiment, the non-naturally occurring or engineered delivery system of the invention is for use in a therapeutic method of treatment or in a research program.

[0410] The invention provides a method of modifying expression of a target gene of interest, the method comprising contacting a target RNA with one or more non-naturally occurring or engineered compositions comprising

[0411] i) a mutated Cas13 effector protein according to the invention as described herein, and

[0412] ii) a crRNA,

[0413] wherein the crRNA comprises a) a guide sequence that hybridizes to a target RNA sequence in a cell, and b) a direct repeat sequence,

[0414] wherein the Cas13 effector protein forms a complex with the crRNA,

[0415] wherein the guide sequence directs sequence-specific binding to the target RNA sequence in a cell,

[0416] whereby there is formed a CRISPR complex comprising the Cas13 effector protein complexed with the guide sequence that is hybridized to the target RNA sequence,

[0417] whereby expression of the target locus of interest is modified. The complex can be formed in vitro or ex vivo and introduced into a cell or contacted with RNA; or can be formed in vivo.

[0418] In some embodiment, the method of modifying expression of a target gene of interest further comprises contacting the target RNA with an accessory protein that enhances Cas13b effector protein activity.

[0419] In some embodiment of the method of modifying expression of a target gene of interest, the accessory protein that enhances Cas13b effector protein activity is a csx28 protein.

[0420] In some embodiment, the method of modifying expression of a target gene of interest further comprises contacting the target RNA with an accessory protein that represses Cas13b effector protein activity.

[0421] In some embodiment of the method of modifying expression of a target gene of interest, the accessory protein that represses Cas13b effector protein activity is a csx27 protein.

[0422] In some embodiment, the method of modifying expression of a target gene of interest comprises cleaving the target RNA.

[0423] In some embodiment, the method of modifying expression of a target gene of interest comprises increasing or decreasing expression of the target RNA.

[0424] In some embodiment of the method of modifying expression of a target gene of interest, the target gene is in a prokaryotic cell.

[0425] In some embodiment of the method of modifying expression of a target gene of interest, the target gene is in a eukaryotic cell.

[0426] The invention provides a cell comprising a modified target of interest, wherein the target of interest has been modified according to any of the method disclosed herein.

[0427] In some embodiment of the invention, the cell is a prokaryotic cell.

[0428] In some embodiment of the invention, the cell is a eukaryotic cell.

[0429] In some embodiment, modification of the target of interest in a cell results in:

a cell comprising altered expression of at least one gene product;
a cell comprising altered expression of at least one gene product, wherein the expression of the at least one gene product is increased; or
a cell comprising altered expression of at least one gene product, wherein the expression of the at least one gene product is decreased.

[0430] In some embodiment, the cell is a mammalian cell or a human cell.

[0431] The invention provides a cell line of or comprising a cell disclosed herein or a cell modified by any of the methods disclosed herein, or progeny thereof.

[0432] The invention provides a multicellular organism comprising one or more cells disclosed herein or one or more cells modified according to any of the methods disclosed herein.

[0433] The invention provides a plant or animal model comprising one or more cells disclosed herein or one or more cells modified according to any of the methods disclosed herein.

[0434] The invention provides a gene product from a cell or the cell line or the organism or the plant or animal model disclosed herein.

[0435] In some embodiment, the amount of gene product expressed is greater than or less than the amount of gene product from a cell that does not have altered expression.

[0436] In certain embodiments, the Cas13 protein originates from a species of the genus Alistipes, Anaerosalibacter, Bacteroides, Bacteroidetes, Bergeyella, Blautia, Butyrivibrio, Capnocytophaga, Carnobacterium, Chloroflexus, Chryseobacterium, Clostridium, Demequina, Eubacteriaceae, Eubacterium, Flavobacterium, Fusobacterium, Herbinix, Insolitispirillum, Lachnospiraceae, Leptotrichia, Listeria, Myroides, Paludibacter, Phaeodactylibacter, Porphyromonadaceae, Porphyromonas, Prevotella, Pseudobutyrivibrio, Psychroflexus, Reichenbachiella, Rhodobacter, Riemerella, Sinomicrobium, Thalassospira, Ruminococcus. As used herein, when a Cas13 protein originates form a species, it may be the wild type Cas13 protein in the species, or a homolog of the wild type Cas13 protein in the species. The Cas13 protein that is a homolog of the wild type Cas13 protein in the species may comprise one or more variations (e.g., mutations, truncations, etc.) of the wild type Cas13 protein.

[0437] In certain embodiments, the Cas13 protein originates from Leptotrichia shahii, Listeria seeligeri, Lachnospiraceae bacterium (such as Lb MA2020, Lb NK4A179, Lb NK4A144), Clostridium aminophilum (such as Ca DSM 10710), Carnobacterium gallinarum (such as Cg DSM 4847), Paludibacter propionicigenes (such as Pp WB4), Listeria weihenstephanensis (such as Lw FSL R9-0317), Listeriaceae bacterium (such as Lb FSL M6-0635), Leptotrichia wadei (such as Lw F0279), Rhodobacter capsulatus (such as Rc SB 1003, Rc R121, Rc DE442), Leptotrichia buccalis (such as Lb C-1013-b), Herbinix hemicellulosilytica, Eubacteriaceae bacterium (such as Eb CHKCI004), Blautia. sp Marseille-P2398, Leptotrichia sp. oral taxon 879 str. F0557, Chloroflexus aggregans, Demequina aurantiaca, Thalassospira sp. TSL5-1, Pseudobutyrivibrio sp. OR37, Butyrivibrio sp. YAB3001, Leptotrichia sp. Marseille-P3007, Bacteroides ihuae, Porphyromonadaceae bacterium (such as Pb KH3CP3RA), Listeria riparia, Insolitispirillum peregrinum, Alistipes sp. ZOR0009, Bacteroides pyogenes (such as Bp F0041), Bacteroidetes bacterium (such as Bb GWA2_31_9), Bergeyella zoohelcum (such as Bz ATCC 43767), Capnocytophaga canimorsus, Capnocytophaga cynodegmi, Chryseobacterium carnipullorum, Chryseobacterium jejuense, Chryseobacterium ureilyticum, Flavobacterium branchiophilum, Flavobacterium columnare, Flavobacterium sp. 316, Myroides odoratimimus (such as Mo CCUG 10230, Mo CCUG 12901, Mo CCUG 3837), Paludibacter propionicigenes, Phaeodactylibacter xiamenensis, Porphyromonas gingivalis (such as Pg F0185, Pg F0568, Pg JCVI SC001, Pg W4087, Porphyromonas gulae, Porphyromonas sp. COT-052 OH4946, Prevotella aurantiaca, Prevotella buccae (such as Pb ATCC 33574), Prevotella falsenii, Prevotella intermedia (such as Pi 17, Pi ZT), Prevotella pallens (such as Pp ATCC 700821), Prevotella pleuritidis, Prevotella saccharolytica (such as Ps F0055), Prevotella sp. MA2016, Prevotella sp. MSX73, Prevotella sp. P4-76, Prevotella sp. P5-119, Prevotella sp. P5-125, Prevotella sp. P5-60, Psychroflexus torquis, Reichenbachiella agariperforans, Riemerella anatipestifer, Sinomicrobium oceani, Fusobacterium necrophorum (such as Fn subsp. funduliforme ATCC 51357, Fn DJ-2, Fn BFTR-1, Fn subsp. funduliforme), Fusobacterium perfoetens (such as Fp ATCC 29250), Fusobacterium ulcerans (such as Fu ATCC 49185), Anaerosalibacter sp. ND1, Eubacterium siraeum, Ruminococcus flavefaciens (such as Rfx XPD3002), or Ruminococcus albus.

[0438] In certain embodiments, the Cas13 is Cas13a and originates from a species of the genus Bacteroides, Blautia, Butyrivibrio, Carnobacterium, Chloroflexus, Clostridium, Demequina, Eubacterium, Herbinix, Insolitispirillum, Lachnospiraceae, Leptotrichia, Listeria, Paludibacter, Porphyromonadaceae, Pseudobutyrivibrio, Rhodobacter, or Thalassospira.

[0439] In certain embodiments, the Cas13 is Cas13a and originates from Leptotrichia shahii, Listeria seeligeri, Lachnospiraceae bacterium (such as Lb MA2020, Lb NK4A179, Lb NK4A144), Clostridium aminophilum (such as Ca DSM 10710), Carnobacterium gallinarum (such as Cg DSM 4847), Paludibacter propionicigenes (such as Pp WB4), Listeria weihenstephanensis (such as Lw FSL R9-0317), Listeriaceae bacterium (such as Lb FSL M6-0635), Leptotrichia wadei (such as Lw F0279), Rhodobacter capsulatus (such as Rc SB 1003, Rc R121, Rc DE442), Leptotrichia buccalis (such as Lb C-1013-b), Herbinix hemicellulosilytica, Eubacteriaceae bacterium (such as Eb CHKCI004), Blautia. sp Marseille-P2398, Leptotrichia sp. oral taxon 879 str. F0557, Chloroflexus aggregans, Demequina aurantiaca, Thalassospira sp. TSL5-1, Pseudobutyrivibrio sp. OR37, Butyrivibrio sp. YAB3001, Leptotrichia sp. Marseille-P3007, Bacteroides ihuae, Porphyromonadaceae bacterium (such as Pb KH3CP3RA), Listeria riparia, or Insolitispirillum peregrinum.

[0440] In certain embodiments, the Cas13 is Cas13b and originates from a species of the genus Alistipes, Bacteroides, Bacteroidetes, Bergeyella, Capnocytophaga, Chryseobacterium, Flavobacterium, Myroides, Paludibacter, Phaeodactylibacter, Porphyromonas, Prevotella, Psychroflexus, Reichenbachiella, Riemerella, or Sinomicrobium.

[0441] In certain embodiments, the Cas13 is Cas13b and originates from Alistipes sp. ZOR0009, Bacteroides pyogenes (such as Bp F0041), Bacteroidetes bacterium (such as Bb GWA2_31_9), Bergeyella zoohelcum (such as Bz ATCC 43767), Capnocytophaga canimorsus, Capnocytophaga cynodegmi, Chryseobacterium carnipullorum, Chryseobacterium jejuense, Chryseobacterium ureilyticum, Flavobacterium branchiophilum, Flavobacterium columnare, Flavobacterium sp. 316, Myroides odoratimimus (such as Mo CCUG 10230, Mo CCUG 12901, Mo CCUG 3837), Paludibacter propionicigenes, Phaeodactylibacter xiamenensis, Porphyromonas gingivalis (such as Pg F0185, Pg F0568, Pg JCVI SC001, Pg W4087, Porphyromonas gulae, Porphyromonas sp. COT-052 OH4946, Prevotella aurantiaca, Prevotella buccae (such as Pb ATCC 33574), Prevotella falsenii, Prevotella intermedia (such as Pi 17, Pi ZT), Prevotella pallens (such as Pp ATCC 700821), Prevotella pleuritidis, Prevotella saccharolytica (such as Ps F0055), Prevotella sp. MA2016, Prevotella sp. MSX73, Prevotella sp. P4-76, Prevotella sp. P5-119, Prevotella sp. P5-125, Prevotella sp. P5-60, Psychroflexus torquis, Reichenbachiella agariperforans, Riemerella anatipestifer, or Sinomicrobium oceani. In some examples, the Cas13 is Riemerella anatipestifer Cas13b. In some examples, when the Cas13 is a dead Riemerella anatipestifer Cas13. In some examples, the Cas13 is Prevotella sp. P5-125. In some examples, the Cas13 is a dead Prevotella sp. P5-125.

[0442] In certain embodiments, the Cas13 is Cas13c and originates from a species of the genus Fusobacterium or Anaerosalibacter.

[0443] In certain embodiments, the Cas13 is Cas13c and originates from Fusobacterium necrophorum (such as Fn subsp. funduliforme ATCC 51357, Fn DJ-2, Fn BFTR-1, Fn subsp. funduliforme), Fusobacterium perfoetens (such as Fp ATCC 29250), Fusobacterium ulcerans (such as Fu ATCC 49185), or Anaerosalibacter sp. ND1.

[0444] In certain embodiments, the Cas13 is Cas13d and originates from a species of the genus Eubacterium or Ruminococcus.

[0445] In certain embodiments, the Cas13 is Cas13d and originates from Eubacterium siraeum, Ruminococcus flavefaciens (such as Rfx XPD3002), or Ruminococcus albus.

[0446] In certain embodiments, the invention provides an isolated Cas13 effector protein, comprising or consisting essentially of or consisting of or as set forth in Tables 1-4, and comprising one or more mutation as described herein elsewhere. A Tables 1-4 Cas13 effector protein is as discussed in more detail herein in conjunction with Tables 1-4. The invention provides an isolated nucleic acid encoding the Cas13 effector protein. In some embodiments of the invention the isolated nucleic acid comprises DNA sequence and further comprises a sequence encoding a crRNA. The invention provides an isolated eukaryotic cell comprising the nucleic acid encoding the Cas13 effector protein. Thus, herein, “Cas13 effector protein” or “effector protein” or “Cas” or “Cas protein” or “RNA targeting effector protein” or “RNA targeting protein” or like expressions is to be understood as including Cas13a, Cas13b, Cas13c, or Cas13d; expressions such as “RNA targeting CRISPR system” are to be understood as including Cas13a, Cas13b, Cas13c, or Cas13d CRISPR systems, and in certain embodiments can be read as a Tables 1-4 Cas13 effector protein CRISPR system; and references to guide RNA or sgRNA are to be read in conjunction with the herein-discussion of the Cas13 system crRNA, e.g., that which is sgRNA in other systems may be considered as or akin to crRNA in the instant invention.

[0447] The invention provides a method of identifying the requirements of a suitable guide sequence for the Cas13 effector protein of the invention (e.g., Tables 1-4), said method comprising:

[0448] (a) selecting a set of essential genes within an organism

[0449] (b) designing a library of targeting guide sequences capable of hybridizing to regions the coding regions of these genes as well as 5′ and 3′ UTRs of these genes

[0450] (c) generating randomized guide sequences that do not hybridize to any region within the genome of said organism as control guides

[0451] (d) preparing a plasmid comprising the RNA-targeting protein and a first resistance gene and a guide plasmid library comprising said library of targeting guides and said control guides and a second resistance gene,

[0452] (e) co-introducing said plasmids into a host cell

[0453] (f) introducing said host cells on a selective medium for said first and second resistance genes

[0454] (g) sequencing essential genes of growing host cells

[0455] (h) determining significance of depletion of cells transformed with targeting guides by comparing depletion of cells with control guides; and

[0456] (i) determining based on the depleted guide sequences the requirements of a suitable guide sequence.

[0457] In one aspect of such method, determining the PFS sequence for suitable guide sequence of the RNA-targeting protein is by comparison of sequences targeted by guides in depleted cells. In one aspect of such method, the method further comprises comparing the guide abundance for the different conditions in different replicate experiments. In one aspect of such method, the control guides are selected in that they are determined to show limited deviation in guide depletion in replicate experiments. In one aspect of such method, the significance of depletion is determined as (a) a depletion which is more than the most depleted control guide; or (b) a depletion which is more than the average depletion plus two times the standard deviation for the control guides. In one aspect of such method, the host cell is a bacterial host cell. In one aspect of such method, the step of co-introducing the plasmids is by electroporation and the host cell is an electro-competent host cell.

[0458] The invention provides a method of modifying sequences associated with or at a target locus of interest, the method comprising delivering to said locus a non-naturally occurring or engineered composition comprising a Cas13 effector protein and one or more nucleic acid components, wherein the effector protein forms a complex with the one or more nucleic acid components and upon binding of the said complex to the locus of interest the effector protein induces the modification of the sequences associated with or at the target locus of interest. In a preferred embodiment, the modification is the introduction of a strand break. In a preferred embodiment, the sequences associated with or at the target locus of interest comprises RNA or consists of RNA.

[0459] The invention provides a method of modifying sequences associated with or at a target locus of interest, the method comprising delivering to said locus a non-naturally occurring or engineered composition comprising a Cas13 effector protein, optionally a small accessory protein, and one or more nucleic acid components, wherein the effector protein forms a complex with the one or more nucleic acid components and upon binding of the said complex to the locus of interest the effector protein induces the modification of the sequences associated with or at the target locus of interest. In a preferred embodiment, the modification is the introduction of a strand break. In a preferred embodiment, the sequences associated with or at the target locus of interest comprises RNA or consists of RNA.

[0460] The invention provides a method of modifying sequences associated with or at a target locus of interest, the method comprising delivering to said sequences associated with or at the locus a non-naturally occurring or engineered composition comprising a Cas13 loci effector protein and one or more nucleic acid components, wherein the Cas13 effector protein forms a complex with the one or more nucleic acid components and upon binding of the said complex to the locus of interest the effector protein induces the modification of sequences associated with or at the target locus of interest. In a preferred embodiment, the modification is the introduction of a strand break. In a preferred embodiment the Cas13 effector protein forms a complex with one nucleic acid component; advantageously an engineered or non-naturally occurring nucleic acid component. The induction of modification of sequences associated with or at the target locus of interest can be Cas13 effector protein-nucleic acid guided. In a preferred embodiment the one nucleic acid component is a CRISPR RNA (crRNA). In a preferred embodiment the one nucleic acid component is a mature crRNA or guide RNA, wherein the mature crRNA or guide RNA comprises a spacer sequence (or guide sequence) and a direct repeat (DR) sequence or derivatives thereof. In a preferred embodiment the spacer sequence or the derivative thereof comprises a seed sequence, wherein the seed sequence is critical for recognition and/or hybridization to the sequence at the target locus. In a preferred embodiment of the invention the crRNA is a short crRNA that may be associated with a short DR sequence. In another embodiment of the invention the crRNA is a long crRNA that may be associated with a long DR sequence (or dual DR). Aspects of the invention relate to Cas13 effector protein complexes having one or more non-naturally occurring or engineered or modified or optimized nucleic acid components. In a preferred embodiment the nucleic acid component comprises RNA. In a preferred embodiment the nucleic acid component of the complex may comprise a guide sequence linked to a direct repeat sequence, wherein the direct repeat sequence comprises one or more stem loops or optimized secondary structures. In preferred embodiments of the invention, the direct repeat may be a short DR or a long DR (dual DR). In a preferred embodiment the direct repeat may be modified to comprise one or more protein-binding RNA aptamers. In a preferred embodiment, one or more aptamers may be included such as part of optimized secondary structure. Such aptamers may be capable of binding a bacteriophage coat protein. The bacteriophage coat protein may be selected from the group comprising Qβ, F2, GA, fr, JP501, MS2, M12, R17, BZ13, JP34, JP500, KU1, M11, MX1, TW18, VK, SP, FI, ID2, NL95, TW19, AP205, ϕCb5, ϕCb8r, ϕCb12r, ϕCb23r, 7s and PRR1. In a preferred embodiment the bacteriophage coat protein is MS2. The invention also provides for the nucleic acid component of the complex being 30 or more, 40 or more or 50 or more nucleotides in length.

[0461] The invention provides methods of genome editing or modifying sequences associated with or at a target locus of interest wherein the method comprises introducing a Cas13 complex into any desired cell type, prokaryotic or eukaryotic cell, whereby the Cas13 effector protein complex effectively functions to interfere with RNA in the eukaryotic or prokaryotic cell. In preferred embodiments, the cell is a eukaryotic cell and the RNA is transcribed from a mammalian genome or is present in a mammalian cell. In preferred methods of RNA editing or genome editing in human cells, the Cas13 effector proteins may include but are not limited to the specific species of Cas13 effector proteins disclosed herein.

[0462] The invention also provides a method of modifying a target locus of interest, the method comprising delivering to said locus a non-naturally occurring or engineered composition comprising a Cas13 effector protein and one or more nucleic acid components, wherein the Cas13 effector protein forms a complex with the one or more nucleic acid components and upon binding of the said complex to the locus of interest the effector protein induces the modification of the target locus of interest. In a preferred embodiment, the modification is the introduction of a strand break.

[0463] In such methods the target locus of interest may be comprised within a RNA molecule. In such methods the target locus of interest may be comprised in a RNA molecule in vitro.

[0464] In such methods the target locus of interest may be comprised in a RNA molecule within a cell. The cell may be a prokaryotic cell or a eukaryotic cell. The cell may be a mammalian cell. The modification introduced to the cell by the present invention may be such that the cell and progeny of the cell are altered for improved production of biologic products such as an antibody, starch, alcohol or other desired cellular output. The modification introduced to the cell by the present invention may be such that the cell and progeny of the cell include an alteration that changes the biologic product produced.

[0465] The mammalian cell many be a non-human mammal, e.g., primate, bovine, ovine, porcine, canine, rodent, Leporidae such as monkey, cow, sheep, pig, dog, rabbit, rat or mouse cell. The cell may be a non-mammalian eukaryotic cell such as poultry bird (e.g., chicken), vertebrate fish (e.g., salmon) or shellfish (e.g., oyster, claim, lobster, shrimp) cell. The cell may also be a plant cell. The plant cell may be of a monocot or dicot or of a crop or grain plant such as cassava, corn, sorghum, soybean, wheat, oat or rice. The plant cell may also be of an algae, tree or production plant, fruit or vegetable (e.g., trees such as citrus trees, e.g., orange, grapefruit or lemon trees; peach or nectarine trees; apple or pear trees; nut trees such as almond or walnut or pistachio trees; nightshade plants; plants of the genus Brassica; plants of the genus Lectica; plants of the genus Spinalis; plants of the genus Capsicum; cotton, tobacco, asparagus, carrot, cabbage, broccoli, cauliflower, tomato, eggplant, pepper, lettuce, spinach, strawberry, blueberry, raspberry, blackberry, grape, coffee, cocoa, etc).

[0466] The invention provides a method of modifying a target locus of interest, the method comprising delivering to said locus a non-naturally occurring or engineered composition comprising a Cas13 effector protein and one or more nucleic acid components, wherein the effector protein forms a complex with the one or more nucleic acid components and upon binding of the said complex to the locus of interest the effector protein induces the modification of the target locus of interest. In a preferred embodiment, the modification is the introduction of a strand break.

[0467] In such methods the target locus of interest may be comprised within an RNA molecule. In a preferred embodiment, the target locus of interest comprises or consists of RNA.

[0468] The invention also provides a method of modifying a target locus of interest, the method comprising delivering to said locus a non-naturally occurring or engineered composition comprising a Cas13 effector protein and one or more nucleic acid components, wherein the Cas13 effector protein forms a complex with the one or more nucleic acid components and upon binding of the said complex to the locus of interest the effector protein induces the modification of the target locus of interest. In a preferred embodiment, the modification is the introduction of a strand break.

[0469] Preferably, in such methods the target locus of interest may be comprised in a RNA molecule in vitro. Also preferably, in such methods the target locus of interest may be comprised in a RNA molecule within a cell. The cell may be a prokaryotic cell or a eukaryotic cell. The cell may be a mammalian cell. The cell may be a rodent cell. The cell may be a mouse cell.

[0470] In any of the described methods the target locus of interest may be a genomic or epigenomic locus of interest. In any of the described methods the complex may be delivered with multiple guides for multiplexed use. In any of the described methods more than one protein(s) may be used.

[0471] In further aspects of the invention the nucleic acid components may comprise a CRISPR RNA (crRNA) sequence. As the effector protein is a Cas13 effector protein, the nucleic acid components may comprise a CRISPR RNA (crRNA) sequence and generally may not comprise any trans-activating crRNA (tracr RNA) sequence.

[0472] In any of the described methods the effector protein and nucleic acid components may be provided via one or more polynucleotide molecules encoding the protein and/or nucleic acid component(s), and wherein the one or more polynucleotide molecules are operably configured to express the protein and/or the nucleic acid component(s). The one or more polynucleotide molecules may comprise one or more regulatory elements operably configured to express the protein and/or the nucleic acid component(s). The one or more polynucleotide molecules may be comprised within one or more vectors. In any of the described methods the target locus of interest may be a genomic, epigenomic, or transcriptomic locus of interest. In any of the described methods the complex may be delivered with multiple guides for multiplexed use. In any of the described methods more than one protein(s) may be used.

[0473] In any of the described methods the strand break may be a single strand break or a double strand break. In preferred embodiments the double strand break may refer to the breakage of two sections of RNA, such as the two sections of RNA formed when a single strand RNA molecule has folded onto itself or putative double helices that are formed with an RNA molecule which contains self-complementary sequences allows parts of the RNA to fold and pair with itself.

[0474] Regulatory elements may comprise inducible promotors. Polynucleotides and/or vector systems may comprise inducible systems.

[0475] In any of the described methods the one or more polynucleotide molecules may be comprised in a delivery system, or the one or more vectors may be comprised in a delivery system.

[0476] In any of the described methods the non-naturally occurring or engineered composition may be delivered via liposomes, particles including nanoparticles, exosomes, microvesicles, a gene-gun or one or more viral vectors.

[0477] The invention also provides a non-naturally occurring or engineered composition which is a composition having the characteristics as discussed herein or defined in any of the herein described methods.

[0478] In certain embodiments, the invention thus provides a non-naturally occurring or engineered composition, such as particularly a composition capable of or configured to modify a target locus of interest, said composition comprising a Cas13 effector protein and one or more nucleic acid components, wherein the effector protein forms a complex with the one or more nucleic acid components and upon binding of the said complex to the locus of interest the effector protein induces the modification of the target locus of interest. In certain embodiments, the effector protein may be a Cas13a, Cas13b, Cas13c, or Cas13d effector protein, preferably a Cas13b effector protein.

[0479] The invention also provides in a further aspect a non-naturally occurring or engineered composition, such as particularly a composition capable of or configured to modify a target locus of interest, said composition comprising: (a) a guide RNA molecule (or a combination of guide RNA molecules, e.g., a first guide RNA molecule and a second guide RNA molecule) or a nucleic acid encoding the guide RNA molecule (or one or more nucleic acids encoding the combination of guide RNA molecules); (b) a Cas13 effector protein. In certain embodiments, the effector protein may be a Cas13b effector protein.

[0480] The invention also provides in a further aspect a non-naturally occurring or engineered composition comprising: (I.) one or more CRISPR-Cas system polynucleotide sequences comprising (a) a guide sequence capable of hybridizing to a target sequence in a polynucleotide locus, (b) a tracr mate (i.e. direct repeat) sequence, and (II.) a second polynucleotide sequence encoding a Cas13 effector protein, wherein when transcribed, the guide sequence directs sequence-specific binding of a CRISPR complex to the target sequence, and wherein the CRISPR complex comprises the Cas13 effector protein complexed with the guide sequence that is hybridized to the target sequence. In certain embodiments, the effector protein may be a Cas13b effector protein.

[0481] In certain embodiments, a tracrRNA may not be required. Hence, the invention also provides in certain embodiments a non-naturally occurring or engineered composition comprising: (I.) one or more CRISPR-Cas system polynucleotide sequences comprising (a) a guide sequence capable of hybridizing to a target sequence in a polynucleotide locus, and (b) a direct repeat sequence, and (II.) a second polynucleotide sequence encoding a Cas13 effector protein, wherein when transcribed, the guide sequence directs sequence-specific binding of a CRISPR complex to the target sequence, and wherein the CRISPR complex comprises the Cas13 effector protein complexed with (1) the guide sequence that is hybridized to the target sequence, and (2) the direct repeat sequence. Preferably, the effector protein may be a Cas13b effector protein. Without limitation, the Applicants hypothesize that in such instances, the direct repeat sequence may comprise secondary structure that is sufficient for crRNA loading onto the effector protein. By means of example and not limitation, such secondary structure may comprise, consist essentially of or consist of a stem loop (such as one or more stem loops) within the direct repeat.

[0482] The invention also provides a vector system comprising one or more vectors, the one or more vectors comprising one or more polynucleotide molecules encoding components of a non-naturally occurring or engineered composition which is a composition having the characteristics as defined in any of the herein described methods.

[0483] The invention also provides a delivery system comprising one or more vectors or one or more polynucleotide molecules, the one or more vectors or polynucleotide molecules comprising one or more polynucleotide molecules encoding components of a non-naturally occurring or engineered composition which is a composition having the characteristics discussed herein or as defined in any of the herein described methods.

[0484] The invention also provides a non-naturally occurring or engineered composition, or one or more polynucleotides encoding components of said composition, or vector or delivery systems comprising one or more polynucleotides encoding components of said composition for use in a therapeutic method of treatment. The therapeutic method of treatment may comprise gene or genome editing, or gene therapy.

[0485] The invention also provides for methods and compositions wherein one or more amino acid residues of the effector protein may be modified e.g., an engineered or non-naturally-occurring Cas13 effector protein of or comprising or consisting or consisting essentially a Tables 1-4 protein. In an embodiment, the modification may comprise mutation of one or more amino acid residues of the effector protein. The one or more mutations may be in one or more catalytically active domains of the effector protein. The effector protein may have reduced or abolished nuclease activity compared with an effector protein lacking said one or more mutations. The effector protein may not direct cleavage of one RNA strand at the target locus of interest. In a preferred embodiment, the one or more mutations may comprise two mutations. In a preferred embodiment the one or more amino acid residues are modified in the Cas13 effector protein, e.g., an engineered or non-naturally-occurring Cas13 effector protein. In certain embodiments of the invention the effector protein comprises one or more HEPN domains. In a preferred embodiment, the effector protein comprises two HEPN domains. In another preferred embodiment, the effector protein comprises one HEPN domain at the C-terminus and another HEPN domain at the N-terminus of the protein. In certain embodiments, the one or more mutations or the two or more mutations may be in a catalytically active domain of the effector protein comprising a HEPN domain, or a catalytically active domain which is homologous to a HEPN domain. In certain embodiments, the effector protein comprises one or more of the following mutations: R116A, H121A, R1177A, H1182A (wherein amino acid positions correspond to amino acid positions of Group 29 protein originating from Bergeyella zoohelcum ATCC 43767). The skilled person will understand that corresponding amino acid positions in different Cas13 proteins may be mutated to the same effect. In certain embodiments, one or more mutations abolish catalytic activity of the protein completely or partially (e.g. altered cleavage rate, altered specificity, etc.) In certain embodiments, the effector protein as described herein is a “dead” effector protein, such as a dead Cas13 effector protein (i.e. dCas13b). In certain embodiments, the effector protein has one or more mutations in HEPN domain 1. In certain embodiments, the effector protein has one or more mutations in HEPN domain 2. In certain embodiments, the effector protein has one or more mutations in HEPN domain 1 and HEPN domain 2. The effector protein may comprise one or more heterologous functional domains. The one or more heterologous functional domains may comprise one or more nuclear localization signal (NLS) domains. The one or more heterologous functional domains may comprise at least two or more NLS domains. The one or more NLS domain(s) may be positioned at or near or in proximity to a terminus of the effector protein (e.g., Cas13b effector protein) and if two or more NLSs, each of the two may be positioned at or near or in proximity to a terminus of the effector protein (e.g., Cas13 effector protein). The one or more heterologous functional domains may comprise one or more transcriptional activation domains. In a preferred embodiment the transcriptional activation domain may comprise VP64. The one or more heterologous functional domains may comprise one or more transcriptional repression domains. In a preferred embodiment the transcriptional repression domain comprises a KRAB domain or a SID domain (e.g. SID4X). The one or more heterologous functional domains may comprise one or more nuclease domains. In a preferred embodiment a nuclease domain comprises FokI.

[0486] The invention also provides for the one or more heterologous functional domains to have one or more of the following activities: methylase activity, demethylase activity, transcription activation activity, transcription repression activity, transcription release factor activity, histone modification activity, nuclease activity, single-strand RNA cleavage activity, double-strand RNA cleavage activity, single-strand DNA cleavage activity, double-strand DNA cleavage activity and nucleic acid binding activity. At least one or more heterologous functional domains may be at or near the amino-terminus of the effector protein and/or wherein at least one or more heterologous functional domains is at or near the carboxy-terminus of the effector protein. The one or more heterologous functional domains may be fused to the effector protein. The one or more heterologous functional domains may be tethered to the effector protein. The one or more heterologous functional domains may be linked to the effector protein by a linker moiety.

[0487] In certain embodiments, the Cas13 effector proteins as intended herein may be associated with a locus comprising short CRISPR repeats between 30 and 40 bp long, more typically between 34 and 38 bp long, even more typically between 36 and 37 bp long, e.g., 30, 31, 32, 33, 34, 35, 36, 37, 38, 39, or 40 bp long. In certain embodiments the CRISPR repeats are long or dual repeats between 80 and 350 bp long such as between 80 and 200 bp long, even more typically between 86 and 88 bp long, e.g., 80, 81, 82, 83, 84, 85, 86, 87, 88, 89, or 90 bp long

[0488] In certain embodiments, a protospacer adjacent motif (PAM) or PAM-like motif directs binding of the effector protein (e.g. a Cas13 effector protein) complex as disclosed herein to the target locus of interest. In some embodiments, the PAM may be a 5′ PAM (i.e., located upstream of the 5′ end of the protospacer). In other embodiments, the PAM may be a 3′ PAM (i.e., located downstream of the 5′ end of the protospacer). In other embodiments, both a 5′ PAM and a 3′ PAM are required. In certain embodiments of the invention, a PAM or PAM-like motif may not be required for directing binding of the effector protein (e.g. a Cas13 effector protein). In certain embodiments, a 5′ PAM is D (e.g., A, G, or U). In certain embodiments, a 5′ PAM is D for Cas13b effectors. In certain embodiments of the invention, cleavage at repeat sequences may generate crRNAs (e.g. short or long crRNAs) containing a full spacer sequence flanked by a short nucleotide (e.g. 5, 6, 7, 8, 9, or 10 nt or longer if it is a dual repeat) repeat sequence at the 5′ end (this may be referred to as a crRNA “tag”) and the rest of the repeat at the 3′ end. In certain embodiments, targeting by the effector proteins described herein may require the lack of homology between the crRNA tag and the target 5′ flanking sequence. This requirement may be similar to that described further in Samai et al. “Co-transcriptional DNA and RNA Cleavage during Type III CRISPR-Cas Immunity” Cell 161, 1164-1174, May 21, 2015, where the requirement is thought to distinguish between bona fide targets on invading nucleic acids from the CRISPR array itself, and where the presence of repeat sequences will lead to full homology with the crRNA tag and prevent autoimmunity.

[0489] In certain embodiments, Cas13 effector protein is engineered and can comprise one or more mutations that reduce or eliminate nuclease activity, thereby reducing or eliminating RNA interfering activity. Mutations can also be made at neighboring residues, e.g., at amino acids near those that participate in the nuclease activity. In some embodiments, one or more putative catalytic nuclease domains are inactivated and the effector protein complex lacks cleavage activity and functions as an RNA binding complex. In a preferred embodiment, the resulting RNA binding complex may be linked with one or more functional domains as described herein.

[0490] In certain embodiments, the one or more functional domains are controllable, i.e. inducible.

[0491] In certain embodiments of the invention, the guide RNA or mature crRNA comprises, consists essentially of, or consists of a direct repeat sequence and a guide sequence or spacer sequence. In certain embodiments, the guide RNA or mature crRNA comprises, consists essentially of, or consists of a direct repeat sequence linked to a guide sequence or spacer sequence. In preferred embodiments of the invention, the mature crRNA comprises a stem loop or an optimized stem loop structure or an optimized secondary structure. In preferred embodiments the mature crRNA comprises a stem loop or an optimized stem loop structure in the direct repeat sequence, wherein the stem loop or optimized stem loop structure is important for cleavage activity. In certain embodiments, the mature crRNA preferably comprises a single stem loop. In certain embodiments, the direct repeat sequence preferably comprises a single stem loop. In certain embodiments, the cleavage activity of the effector protein complex is modified by introducing mutations that affect the stem loop RNA duplex structure. In preferred embodiments, mutations which maintain the RNA duplex of the stem loop may be introduced, whereby the cleavage activity of the effector protein complex is maintained. In other preferred embodiments, mutations which disrupt the RNA duplex structure of the stem loop may be introduced, whereby the cleavage activity of the effector protein complex is completely abolished.

[0492] The CRISPR system as provided herein can make use of a crRNA or analogous polynucleotide comprising a guide sequence, wherein the polynucleotide is an RNA, a DNA or a mixture of RNA and DNA, and/or wherein the polynucleotide comprises one or more nucleotide analogs. The sequence can comprise any structure, including but not limited to a structure of a native crRNA, such as a bulge, a hairpin or a stem loop structure. In certain embodiments, the polynucleotide comprising the guide sequence forms a duplex with a second polynucleotide sequence which can be an RNA or a DNA sequence.

[0493] The present disclosure also provides cells, tissues, organisms comprising the engineered CRISPR-Cas protein, the CRISPR-Cas systems, the polynucleotides encoding one or more components of the CRISPR-Cas systems, and/or vectors comprising the polynucleotides. The invention also provides for the nucleotide sequence encoding the effector protein being codon optimized for expression in a eukaryote or eukaryotic cell in any of the herein described methods or compositions. In an embodiment of the invention, the codon optimized effector protein is any Cas13 effector protein discussed herein and is codon optimized for operability in a eukaryotic cell or organism, e.g., such cell or organism as elsewhere herein mentioned, for instance, without limitation, a yeast cell, or a mammalian cell or organism, including a mouse cell, a rat cell, and a human cell or non-human eukaryote organism, e.g., plant.

[0494] In certain embodiments of the invention, at least one nuclear localization signal (NLS) is attached to the nucleic acid sequences encoding the Cas13 effector proteins. In preferred embodiments at least one or more C-terminal or N-terminal NLSs are attached (and hence nucleic acid molecule(s) coding for the Cas13 effector protein can include coding for NLS(s) so that the expressed product has the NLS(s) attached or connected). In a preferred embodiment a C-terminal NLS is attached for optimal expression and nuclear targeting in eukaryotic cells, preferably human cells. The invention also encompasses methods for delivering multiple nucleic acid components, wherein each nucleic acid component is specific for a different target locus of interest thereby modifying multiple target loci of interest. The nucleic acid component of the complex may comprise one or more protein-binding RNA aptamers. The one or more aptamers may be capable of binding a bacteriophage coat protein.

[0495] In a further aspect, the invention provides a eukaryotic cell comprising a modified target locus of interest, wherein the target locus of interest has been modified according to in any of the herein described methods. A further aspect provides a cell line of said cell. Another aspect provides a multicellular organism comprising one or more said cells.

[0496] In certain embodiments, the modification of the target locus of interest may result in: the eukaryotic cell comprising altered expression of at least one gene product; the eukaryotic cell comprising altered expression of at least one gene product, wherein the expression of the at least one gene product is increased; the eukaryotic cell comprising altered expression of at least one gene product, wherein the expression of the at least one gene product is decreased; or the eukaryotic cell comprising an edited genome.

[0497] In certain embodiments, the eukaryotic cell may be a mammalian cell or a human cell.

[0498] In further embodiments, the non-naturally occurring or engineered compositions, the vector systems, or the delivery systems as described in the present specification may be used for: site-specific gene knockout; site-specific genome editing; RNA sequence-specific interference; or multiplexed genome engineering.

[0499] Also provided is a gene product from the cell, the cell line, or the organism as described herein. In certain embodiments, the amount of gene product expressed may be greater than or less than the amount of gene product from a cell that does not have altered expression or edited genome. In certain embodiments, the gene product may be altered in comparison with the gene product from a cell that does not have altered expression or edited genome.

[0500] In another aspect, the invention provides a method for identifying novel nucleic acid modifying effectors, comprising: identifying putative nucleic acid modifying loci from a set of nucleic acid sequences encoding the putative nucleic acid modifying enzyme loci that are within a defined distance from a conserved genomic element of the loci, that comprise at least one protein above a defined size limit, or both; grouping the identified putative nucleic acid modifying loci into subsets comprising homologous proteins; identifying a final set of candidate nucleic acid modifying loci by selecting nucleic acid modifying loci from one or more subsets based on one or more of the following; subsets comprising loci with putative effector proteins with low domain homology matches to known protein domains relative to loci in other subsets, subsets comprising putative proteins with minimal distances to the conserved genomic element relative to loci in other subsets, subsets with loci comprising large effector proteins having a same orientations as putative adjacent accessory proteins relative to large effector proteins in other subsets, subset comprising putative effector proteins with lower existing nucleic acid modifying classifications relative to other loci, subsets comprising loci with a lower proximity to known nucleic acid modifying loci relative to other subsets, and total number of candidate loci in each subset.

[0501] In one embodiment, the set of nucleic acid sequences is obtained from a genomic or metagenomic database, such as a genomic or metagenomic database comprising prokaryotic genomic or metagenomic sequences.

[0502] In one embodiment, the defined distance from the conserved genomic element is between 1 kb and 25 kb.

[0503] In one embodiment, the conserved genomic element comprises a repetitive element, such as a CRISPR array. In a specific embodiment, the defined distance from the conserved genomic element is within 10 kb of the CRISPR array.

[0504] In one embodiment, the defined size limit of a protein comprised within the putative nucleic acid modifying (effector) locus is greater than 200 amino acids, or more particularly, the defined size limit is greater than 700 amino acids. In one embodiment, the putative nucleic acid modifying locus is between 900 to 1800 amino acids.

[0505] In one embodiment, the conserved genomic elements are identified using a repeat or pattern finding analysis of the set of nucleic acids, such as PILER-CR.

[0506] In one embodiment, the grouping step of the method described herein is based, at least in part, on results of a domain homology search or an HHpred protein domain homology search.

[0507] In one embodiment, the defined threshold is a BLAST nearest-neighbor cut-off value of 0 to le-7.

[0508] In one embodiment, the method described herein further comprises a filtering step that includes only loci with putative proteins between 900 and 1800 amino acids.

[0509] In one embodiment, the method described herein further comprises experimental validation of the nucleic acid modifying function of the candidate nucleic acid modifying effectors comprising generating a set of nucleic acid constructs encoding the nucleic acid modifying effectors and performing one or more biochemical validation assays, such as through the use of PAM validation in bacterial colonies, in vitro cleavage assays, the Surveyor method, experiments in mammalian cells, PFS validation, or a combination thereof.

[0510] In one embodiment, the method described herein further comprises preparing a non-naturally occurring or engineered composition comprising one or more proteins from the identified nucleic acid modifying loci.

[0511] In one embodiment, the identified loci comprise a Class 2 CRISPR effector, or the identified loci lack Cas1 or Cas2, or the identified loci comprise a single effector.

[0512] In one embodiment, the single large effector protein is greater than 900, or greater than 1100 amino acids in length, or comprises at least one HEPN domain.

[0513] In one embodiment, the at least one HEPN domain is near a N- or C-terminus of the effector protein, or is located in an interior position of the effector protein.

[0514] In one embodiment, the single large effector protein comprises a HEPN domain at the N- and C-terminus and two HEPN domains internal to the protein.

[0515] In one embodiment, the identified loci further comprise one or two small putative accessory proteins within 2 kb to 10 kb of the CRISPR array.

[0516] In one embodiment, a small accessory protein is less than 700 amino acids. In one embodiment, the small accessory protein is from 50 to 300 amino acids in length.

[0517] In one embodiment, the small accessory protein comprises multiple predicted transmembrane domains, or comprises four predicted transmembrane domains, or comprises at least one HEPN domain.

[0518] In one embodiment, the small accessory protein comprises at least one HEPN domain and at least one transmembrane domain.

[0519] In one embodiment, the loci comprise no additional proteins out to 25 kb from the CRISPR array.

[0520] In one embodiment, the CRISPR array comprises direct repeat sequences comprising about 36 nucleotides in length. In a specific embodiment, the direct repeat comprises a GTTG/GUUG at the 5′ end that is reverse complementary to a CAAC at the 3′ end.

[0521] In one embodiment, the CRISPR array comprises spacer sequences comprising about 30 nucleotides in length.

[0522] In one embodiment, the identified loci lack a small accessory protein.

[0523] The invention provides a method of identifying novel CRISPR effectors, comprising: a) identifying sequences in a genomic or metagenomic database encoding a CRISPR array; b) identifying one or more Open Reading Frames (ORFs) in said selected sequences within 10 kb of the CRISPR array; c) selecting loci based on the presence of a putative CRISPR effector protein between 900-1800 amino acids in size, d) selecting loci encoding a putative accessory protein of 50-300 amino acids; and e) identifying loci encoding a putative CRISPR effector and CRISPR accessory proteins and optionally classifying them based on structure analysis.

[0524] In one embodiment, the CRISPR effector is a Type VI CRISPR effector. In an embodiment, step (a) comprises i) comparing sequences in a genomic and/or metagenomic database with at least one pre-identified seed sequence that encodes a CRISPR array, and selecting sequences comprising said seed sequence; or ii) identifying CRISPR arrays based on a CRISPR algorithm.

[0525] In an embodiment, step (d) comprises identifying nuclease domains. In an embodiment, step (d) comprises identifying RuvC, HPN, and/or HEPN domains.

[0526] In an embodiment, no ORF encoding Cas1 or Cas2 is present within 10 kb of the CRISPR array

[0527] In an embodiment, an ORF in step (b) encodes a putative accessory protein of 50-300 amino acids.

[0528] In an embodiment, putative novel CRISPR effectors obtained in step (d) are used as seed sequences for further comparing genomic and/or metagenomics sequences and subsequent selecting loci of interest as described in steps a) to d) of claim 1. In an embodiment, the pre-identified seed sequence is obtained by a method comprising: (a) identifying CRISPR motifs in a genomic or metagenomic database, (b) extracting multiple features in said identified CRISPR motifs, (c) classifying the CRISPR loci using unsupervised learning, (d) identifying conserved locus elements based on said classification, and (e) selecting therefrom a putative CRISPR effector suitable as seed sequence.

[0529] In an embodiment, the features include protein elements, repeat structure, repeat sequence, spacer sequence and spacer mapping. In an embodiment, the genomic and metagenomic databases are bacterial and/or archaeal genomes. In an embodiment, the genomic and metagenomic sequences are obtained from the Ensembl and/or NCBI genome databases. In an embodiment, the structure analysis in step (d) is based on secondary structure prediction and/or sequence alignments. In an embodiment, step (d) is achieved by clustering of the remaining loci based on the proteins they encode and manual curation of the obtained clusters. n another aspect, the disclosure provides a mutated Cas13 protein comprising one or more mutations of amino acids, wherein the amino acids: interact with a guide RNA that forms a complex with the mutated Cas 13 protein; or are in a HEPN active site, a lid domain which is a domain that caps the 3′ end of the crRNA with two beta hairpins (see, e.g., FIG. 1, FIG. 18), a helical domain, selected from a helical 1 or a helical 2 domain, an inter-domain linker (IDL) domain, or a bridge helix domain of the engineered Cas 13 protein. In certain embodiments the helical domain 1 is helical domain 1-1, 1-2 or 1-3. In embodiments helical domain 2 is helical domain 2-1 or 2-2. In one aspect, the engineered Cas13 protein has a higher protease activity or polynucleotide-binding capability compared with a naturally-occurring counterpart Cas13 protein.

[0530] In some embodiments, the Cas13 protein is Cas13a, Cas13b, Cas13c, or Cas13d. In some embodiments, the Cas13 protein is Cas13b. In some embodiments, the amino acids interact with the guide RNA that forms a complex with the mutated Cas 13 protein. In some embodiments, the amino acids correspond to the following amino acids of Prevotella buccae Cas13b (PbCas13b): T405, H407, K457, H500, K570, K590, N634, R638, N652, N653, K655, S658, K741, K744, N756, S757, R762, R791, K846, K857, K870, and R877. In some embodiments, the amino acids are in a HEPN active site. In some embodiments, the amino acids correspond to the following amino acids of Prevotella buccae Cas13b (PbCas13b): amino acids 46-57, 73-79, 152-164, 1036-1046, and 1064-1074. In some embodiments, the amino acids correspond to the following amino acids of Prevotella buccae Cas13b (PbCas13b): R156, N157, H161, R1068, N1069, and H1073. In some embodiments, the amino acids are in the inter-domain linker domain of the mutated Cas 13 protein. In some embodiments, the amino acids correspond to the following amino acids of Prevotella buccae Cas13b (PbCas13b): R285, R287, K292, K294, E296, and N297. In some embodiments, the amino acids are in the bridge helix domain of the mutated Cas 13 protein. In some embodiments, the amino acids correspond to the following amino acids of Prevotella buccae Cas13b (PbCas13b): K826, K828, K829, R824, R830, Q831, K835, K836, and R838.

[0531] In another aspect, the disclosure provides a method of altering activity of a Cas13 protein, comprising: identifying one or more candidate amino acids in the Cas13 protein based on a three-dimensional structure of at least a portion of the Cas 13 protein, wherein the one or more candidate amino acids interact with a guide RNA that forms a complex with the Cas13 protein, or are in a HEPN active site, an inter-domain linker domain, or a bridge helix domain of the Cas13 protein; and mutating the one or more candidate amino acids thereby generating a mutated Cas13 protein, wherein activity the mutated Cas13 protein is different than the Cas13 protein.

[0532] In some embodiments, the Cas13 protein is Cas13a, Cas13b, Cas13c, or Cas13d. In some embodiments, the Cas13 protein is Cas13b. In some embodiments, the amino acids interact with the guide RNA that forms a complex with the mutated Cas 13 protein. In some embodiments, the amino acids correspond to the following amino acids of Prevotella buccae Cas13b (PbCas13b): T405, H407, K457, H500, K570, K590, N634, R638, N652, N653, K655, S658, K741, K744, N756, S757, R762, R791, K846, K857, K870, and R877. In some embodiments, the amino acids are in a HEPN active site. In some embodiments, the amino acids correspond to the following amino acids of Prevotella buccae Cas13b (PbCas13b): amino acids 46-57, 73-79, 152-164, 1036-1046, and 1064-1074. In some embodiments, the amino acids correspond to the following amino acids of Prevotella buccae Cas13b (PbCas13b): R156, N157, H161, R1068, N1069, and H1073. In some embodiments, the amino acids are in the inter-domain linker domain of the mutated Cas 13 protein. In some embodiments, the amino acids correspond to the following amino acids of Prevotella buccae Cas13b (PbCas13b): R285, R287, K292, K294, E296, and N297. In some embodiments, the amino acids are in the bridge helix domain of the mutated Cas 13 protein. In some embodiments, the amino acids correspond to the following amino acids of Prevotella buccae Cas13b (PbCas13b): K826, K828, K829, R824, R830, Q831, K835, K836, and R838.

[0533] In some embodiments, the Cas13 protein is Cas13b. In some embodiments, the Cas13b is a Cas13 ortholog smaller in size than Cas13 systems discovered to date. In some embodiments, the Cas 13b is Cas13b-t1, Cas13b-t1a, Cas13b-t2, or Cas13b-t3. In some embodiments, the Cas13b is Cas13b-t1. In some embodiments, the Cas13b is Cas13b-t1a. In some embodiments, the Cas13b is Cas13b-t2. In some embodiments, the Cas13b is Cas13b-t3. CAS13 ORTHOLOGS

[0534] The terms “orthologue” (also referred to as “ortholog” herein) and “homologue” (also referred to as “homolog” herein) are well known in the art. By means of further guidance, a “homologue” of a protein as used herein is a protein of the same species which performs the same or a similar function as the protein it is a homologue of. Homologous proteins may but need not be structurally related, or are only partially structurally related. An “orthologue” of a protein as used herein is a protein of a different species which performs the same or a similar function as the protein it is an orthologue of. Orthologous proteins may but need not be structurally related, or are only partially structurally related. In particular embodiments, the homologue or orthologue of a Cas13 protein as referred to herein has a sequence homology or identity of at least 60%, preferably at least 70%, preferably at least 80%, more preferably at least 85%, even more preferably at least 90%, such as for instance at least 95% with a Cas13 effector protein set forth in Tables 1-4, below. In a preferred embodiment, the Cas13b effector protein may be of or from an organism identified in Tables 1-4 or the genus to which the organism belongs.

[0535] It has been found that a number of Cas13 orthologs are characterized by common motifs. Accordingly, in particular embodiments, the Cas13b effector protein is a protein comprising a sequence having at least 70% sequence identity with one or more of the sequences consisting of DKHXFGAFLNLARHN (SEQ ID NO:96), GLLFFVSLFLDK (SEQ ID NO:97), SKIXGFK (SEQ ID NO:98), DMLNELXRCP (SEQ ID NO:99), RXZDRFPYFALRYXD (SEQ ID NO:100) and LRFQVBLGXY (SEQ ID NO:101). In further particular embodiments, the Cas13b effector protein comprises a sequence having at least 70% sequence identity at least 2, 3, 4, 5 or all 6 of these sequences. In further particular embodiments, the sequence identity with these sequences is at least 75%, 80%, 85%, 90%, 95% or 100%. In further particular embodiments, the Cas13b effector protein is a protein comprising a sequence having 100% sequence identity with GLLFFVSLFL (SEQ ID NO:102) and RHQXRFPYF (SEQ ID NO:103). In further particular embodiments, the Cas13b effector is a Cas13b effector protein comprising a sequence having 100% sequence identity with RHQDRFPY (SEQ ID NO:104).

[0536] In particular embodiments, the Cas13b effector protein is a Cas13b effector protein having at least 65%, preferably at least 70%, 75%, 80%, 85%, 90%, 95% or more sequence identity with a Cas13b protein from Prevotella buccae, Porphyromonas gingivalis, Prevotella saccharolytica, Riemerella antipestifer. In further particular embodiments, the Cas13b effector is selected from the Cas13b protein from Bacteroides pyogenes, Prevotella sp. MA2016, Riemerella anatipestifer, Porphyromonas gulae, Porphyromonas gingivalis, and Porphyromonas sp.COT-0520H4946.

[0537] It will be appreciated that orthologs of a Table 1 Cas13b enzyme that can be within the invention can include a chimeric enzyme comprising a fragment of a Table 1 Cas13b enzyme of multiple orthologs. Examples of such orthologs are described elsewhere herein. A chimeric enzyme may comprise a fragment of a Table 1 Cas13b enzyme and a fragment from another CRISPR enzyme, such as an ortholog of a Table 1 Cas13b enzyme of an organism which includes but is not limited to Bergeyella, Prevotella, Porphyromonas, Bacteroides, Alistipes, Riemerella, Myroides, Flavobacterium, Capnocytophaga, Chryseobacterium, Phaeodactylibacter, Paludibacter or Psychroflexus. A chimeric enzyme can comprise a first fragment and a second fragment, and the fragments, wherein one of the first and second a fragment is of or from a Table 1 Cas13b enzyme and the other fragment is of or from a CRISPR enzyme ortholog of a different species. In some cases, Cas13b is Cas13b-t. For example, Cas13b may be Cas13b-t1 (e.g., Cas13b-t1a), Cas13b-t2, or Cas13b-t3 (see, e.g. FIGS. 54A-54C).

[0538] In embodiments, the Cas13 RNA-targeting Cas13 effector proteins referred to herein also encompasses a functional variant of the effector protein or a homologue or an orthologue thereof. A “functional variant” of a protein as used herein refers to a variant of such protein which retains at least partially the activity of that protein. Functional variants may include mutants (which may be insertion, deletion, or replacement mutants), including polymorphs, etc., including as discussed herein in conjunction with Table 1. Also included within functional variants are fusion products of such protein with another, usually unrelated, nucleic acid, protein, polypeptide or peptide. Functional variants may be naturally occurring or may be man-made. In an embodiment, nucleic acid molecule(s) encoding the Cas13 RNA-targeting effector proteins, or an ortholog or homolog thereof, may be codon-optimized for expression in an eukaryotic cell. A eukaryote can be as herein discussed. Nucleic acid molecule(s) can be engineered or non-naturally occurring.

[0539] In an embodiment, the Cas13 RNA-targeting effector protein or an ortholog or homolog thereof, may comprise one or more mutations. The mutations may be artificially introduced mutations and may include but are not limited to one or more mutations in a catalytic domain, e.g., one or more mutations are introduced into one or more of the HEPN domains.

[0540] In an embodiment, the Cas13 protein or an ortholog or homolog thereof, may be used as a generic nucleic acid binding protein with fusion to or being operably linked to a functional domain. Exemplary functional domains may include but are not limited to translational initiator, translational activator, translational repressor, nucleases, in particular ribonucleases, a spliceosome, beads, a light inducible/controllable domain or a chemically inducible/controllable domain.

[0541] In an advantageous embodiment, the present invention encompasses Cas13 effector proteins with reference to Tables 1-5. In certain example embodiments, the Cas13 effector protein is from an organism identified in Tables 1-5. In certain example embodiments, the Cas13 effector protein is from an organism selected from Bergeyella zoohelcum, Prevotella intermedia, Prevotella buccae, Porphyromonas gingivalis, Bacteroides pyogenes, Alistipes sp. ZOR0009, Prevotella sp. MA2016, Riemerella anatipestifer, Prevotella aurantiaca, Prevotella saccharolytica, Myroides odoratimimus CCUG 10230, Capnocytophaga canimorsus, Porphyromonas gulae, Prevotella sp. P5-125, Flavobacterium branchiophilum, Myroides odoratimimus, Flavobacterium columnare, or Porphyromonas sp. COT-052 OH4946. In another embodiment, the one or more guide RNAs are designed to bind to one or more target RNA sequences that are diagnostic for a disease state.

[0542] In certain example embodiments, the CRISPR effector protein is a Cas13b protein selected from Table 1.

TABLE 1

| | | |
|---|---|---|
| Bergeyella | 1 | MENKTSLGNNIYYNPFKPQDKSYFAGYFNAAMENTDSVFRELG |
| zoohelcum | | KRLKGKEYTSENFFDAIFKENISLVEYERYVKLLSDYFPMARLL |
| (SEQ ID | | DKKEVPIKERKENFKKNFKGIIKAVRDLRNFYTHKEHGEVEITD |
| No. 105) | | EIFGVLDEMLKSTVLTVKKKKVKTDKTKEILKKSIEKQLDILCQ |
| | | KKLEYLRDTARKIEEKRRNQRERGEKELVAPFKYSDKRDDLIA |
| | | AIYNDAFDVYIDKKKDSLKESSKAKYNTKSDPQQEEGDLKIPIS |
| | | KNGVVFLLSLFLTKQEIHAFKSKIAGFKATVIDEATVSEATVSHG |
| | | KNSICFMATHEIFSHLAYKKLKRKVRTAEINYGEAENAEQLSVY |
| | | AKETLMMQMLDELSKVPDVVYQNLSEDVQKTFIEDWNEYLKE |
| | | NNGDVGTMEEEQVIHPVIRKRYEDKFNYFAIRFLDEFAQFPTLR |
| | | FQVHLGNYLHDSRPKENLISDRRIKEKITVFGRLSELEHKKALFI |
| | | KNTETNEDREHYWEIFPNPNYDFPKENISVNDKDFPIAGSILDRE |
| | | KQPVAGKIGIKVKLLNQQYVSEVDKAVKAHQLKQRKASKPSIQ |
| | | NIIEEIVPINESNPKEAIVFGGQPTAYLSMNDIHSILYEFFDKWEK |
| | | KKEKLEKKGEKELRKEIGKELEKKIVGKIQAQIQQIIDKDTNAKI |
| | | LKPYQDGNSTAIDKEKLIKDLKQEQNILQKLKDEQTVREKEYN |
| | | DFIAYQDKNREINKVRDRNHKQYLKDNLKRKYPEAPARKEVL |
| | | YYREKGKVAVWLANDIKRFMPTDFKNEWKGEQHSLLQKSLAY |
| | | YEQCKEELKNLLPEKVFQHLPFKLGGYFQQKYLYQFYTCYLDK |
| | | RLEYISGLVQQAENFKSENKVFKKVENECFKFLKKQNYTHKEL |
| | | DARVQSILGYPIFLERGFMDEKPTIIKGKTFKGNEALFADWFRY |
| | | YKEYQNFQTFYDTENYPLVELEKKQADRKRKTKIYQQKKNDV |
| | | FTLLMAKHIFKSVFKQDSIDQFSLEDLYQSREERLGNQERARQT |
| | | GERNTNYIWNKTVDLKLCDGKITVENVKLKNVGDFIKYEYDQR |
| | | VQAFLKYEENIEWQAFLIKESKEEENYPYVVEREIEQYEKVRRE |
| | | ELLKEVHLIEEYILEKVKDKEILKKGDNQNFKYYILNGLLKQLK |
| | | NEDVESYKVFNLNTEPEDVNINQLKQEATDLEQKAFVLTYIRN |
| | | KFAHNQLPKKEFWDYCQEKYGKIEKEKTYAEYFAEVFKKEKE |
| | | ALIK |
| Prevotella | 2 | MEDDKKTTDSIRYELKDKHFWAAFLNLARHNVYITVNHINKIL |
| intermedia | | EEGEINRDGYETTLKNTWNEIKDINKKDRLSKLIIKHFPFLEAAT |
| (SEQ ID | | YRLNPTDTTKQKEEKQAEAQSLESLRKSFFVFIYKLRDLRNHYS |
| No. 106) | | HYKHSKSLERPKFEEGLLEKMYNIFNASIRLVKEDYQYNKDINP |
| | | DEDFKHLDRTEEEFNYYFTKDNEGNITESGLLFFVSLFLEKKDAI |
| | | WMQQKLRGFKDNRENKKKMTNEVFCRSRMLLPKLRLQSTQTQ |
| | | DWILLDMLNELIRCPKSLYERLREEDREKFRVPIEIADEDYDAEQ |
| | | EPFKNTLVRHQDRFPYFALRYFDYNEIFTNLRFQIDLGTYHFSIY |
| | | KKQIGDYKESHHLTHKLYGFERIQEFTKQNRPDEWRKFVKTFN |
| | | SFETSKEPYIPETTPHYHLENQKIGIRFRNDNDKIWPSLKTNSEK |
| | | NEKSKYKLDKSFQAEAFLSVHELLPMMFYYLLLKTENTDNDNE |
| | | IETKKKENKNDKQEKHKIEEIIENKITEIYALYDTFANGEIKSIDE |
| | | LEEYCKGKDIEIGHLPKQMIAILKDEHKVMATEAERKQEEMLV |
| | | DVQKSLESLDNQINEEIENVERKNSSLKSGKIASWLVNDMMRF |
| | | QPVQKDNEGKPLNNSKANSTEYQLLQRTLAFFGSEHERLAPYF |
| | | KQTKLIESSNPHPFLKDTEWEKCNNILSFYRSYLEAKKNFLESLK |
| | | PEDWEKNQYFLKLKEPKTKPKTLVQGWKNGFNLPRGIFTEPIRK |
| | | WFMKHRENITVAELKRVGLVAKVIPLFFSEEYKDSVQPFYNYH |
| | | FNVGNINKPDEKNFLNCEERRELLRKKKDEFKKMTDKEKEENP |
| | | SYLEFKSWNKFERELRLVRNQDIVTWLLCMELFNKKKIKELNV |
| | | EKIYLKNINTNTTKKEKNTEEKNGEEKNIKEKNNILNRIMPMRL |
| | | PIKVYGRENFSKNKKKKIRRNTFFTVYIEEKGTKLLKQGNFKAL |
| | | ERDRRLGGLFSFVKTPSKAESKSNTISKLRVEYELGEYQKARIEII |
| | | KDMLALEKTLIDKYNSLDTDNFNKMLTDWLELKGEPDKASFQ |
| | | NDVDLLIAVRNAFSHNQYPMRNRIAFANINPFSLSSANTSEEKG |
| | | LGIANQLKDKTHKTIEKIIEIEKPIETKE |
| Prevotella | 3 | MQKQDKLFVDRKKNAIFAFPKYITIMENKEKPEPIYYELTDKHF |
| buccae | | WAAFLNLARHNVYTTINHINRRLEIAELKDDGYMMGIKGSWNE |
| (SEQ ID | | QAKKLDKKVRLRDLIMKHFPFLEAAAYEMTNSKSPNNKEQRE |
| No. 107) | | KEQSEALSLNNLKNVLFIFLEKLQVLRNYYSHYKYSEESPKPIFE |
| WP_004343973.1 | | TSLLKNMYKVFDANVRLVKRDYMHHENIDMQRDFTHLNRKK |
| | | QVGRTKNIIDSPNFHYHFADKEGNMTIAGLLFFVSLFLDKKDAI |
| | | WMQKKLKGFKDGRNLREQMTNEVFCRSRISLPKLKLENVQTK |
| | | DWMQLDMLNELVRCPKSLYERLREKDRESFKVPFDIFSDDYNA |
| | | EEEPFKNTLVRHQDRFPYFVLRYFDLNEIFEQLRFQIDLGTYHFS |
| | | IYNKRIGDEDEVRHLTHHLYGFARIQDFAPQNQPEEWRKLVKD |
| | | LDHFETSQEPYISKTAPHYHLENEKIGIKFCSAHNNLFPSLQTDK |
| | | TCNGRSKFNLGTQFTAEAFLSVHELLPMMFYYLLLTKDYSRKE |
| | | SADKVEGIIRKEISNIYAIYDAFANNEINSIADLTRRLQNTNILQG |
| | | HLPKQMISILKGRQKDMGKEAERKIGEMIDDTQRRLDLLCKQT |
| | | NQKIRIGKRNAGLLKSGKIADWLVNDMMRFQPVQKDQNNIPIN |
| | | NSKANSTEYRMLQRALALFGSENFRLKAYFNQMNLVGNDNPH |
| | | PFLAETQWEHQTNILSFYRNYLEARKKYLKGLKPQNWKQYQH |
| | | FLILKVQKTNRNTLVTGWKNSFNLPRGIFTQPIREWFEKHNNSK |
| | | RIYDQILSFDRVGFVAKAIPLYFAEEYKDNVQPFYDYPFNIGNRL |
| | | KPKKRQFLDKKERVELWQKNKELFKNYPSEKKKTDLAYLDFLS |
| | | WKKFERELRLIKNQDIVTWLMFKELFNMATVEGLKIGEIHLRDI |
| | | DTNTANEESNNILNRIMPMKLPVKTYETDNKGNILKERPLATFY |
| | | IEETETKVLKQGNFKALVKDRRLNGLFSFAETTDLNLEEHPISKL |
| | | SVDLELIKYQTTRISIFEMTLGLEKKLIDKYSTLPTDSFRNMLER |
| | | WLQCKANRPELKNYVNSLIAVRNAFSHNQYPMYDATLFAEVK |
| | | KFTLFPSVDTKKIELNIAPQLLEIVGKAIKEIEKSENKN |
| Porphyromonas | 4 | MNTVPASENKGQSRTVEDDPQYFGLYLNLARENLIEVESHVRIK |
| gingivalis | | FGKKKLNEESLKQSLLCDHLLSVDRWTKVYGHSRRYLPFLHYF |
| (SEQ ID | | DPDSQIEKDHDSKTGVDPDSAQRLIRELYSLLDFLRNDFSHNRL |
| No. 108) | | DGTTFEHLEVSPDISSFITGTYSLACGRAQSRFAVFFKPDDFVLA |
| | | KNRKEQLISVADGKECLTVSGFAFFICLFLDREQASGMLSRIRGF |
| | | KRTDENWARAVHETFCDLCIRHPHDRLESSNTKEALLLDMLNE |
| | | LNRCPRILYDMLPEEERAQFLPALDENSMNNLSENSLDEESRLL |
| | | WDGSSDWAEALTKRIRHQDRFPYLMLRFIEEMDLLKGIRFRVD |
| | | LGEIELDSYSKKVGRNGEYDRTITDHALAFGKLSDFQNEEEVSR |
| | | MISGEASYPVRFSLFAPRYAIYDNKIGYCHTSDPVYPKSKTGEK |
| | | RALSNPQSMGFISVHDLRKLLLMELLCEGSFSRMQSDFLRKANR |
| | | ILDETAEGKLQFSALFPEMRHRFIPPQNPKSKDRREKAETTLEKY |
| | | KQEIKGRKDKLNSQLLSAFDMDQRQLPSRLLDEWMNIRPASHS |
| | | VKLRTYVKQLNEDCRLRLRKFRKDGDGKARAIPLVGEMATFLS |
| | | QDIVRMIISEETKKLITSAYYNEMQRSLAQYAGEENRRQFRAIV |
| | | AELRLLDPSSGHPFLSATMETAHRYTEGFYKCYLEKKREWLAK |
| | | IFYRPEQDENTKRRISVFFVPDGEARKLLPLLIRRRMKEQNDLQ |
| | | DWIRNKQAHPIDLPSHLFDSKVMELLKVKDGKKKWNEAFKDW |
| | | WSTKYPDGMQPFYGLRRELNIHGKSVSYIPSDGKKFADCYTHL |
| | | MEKTVRDKKRELRTAGKPVPPDLAADIKRSFHRAVNEREFMLR |
| | | LVQEDDRLMLMAINKMMTDREEDILPGLKNIDSILDEENQFSLA |
| | | VHAKVLEKEGEGGDNSLSLVPATIEIKSKRKDWSKYIRYRYDR |
| | | RVPGLMSHFPEHKATLDEVKTLLGEYDRCRIKIFDWAFALEGAI |
| | | MSDRDLKPYLHESSSREGKSGEHSTLVKMLVEKKGCLTPDESQ |
| | | YLILIRNKAAHNQFPCAAEMPLIYRDVSAKVGSIEGSSAKDLPE |
| | | GSSLVDSLWKKYEMIIRKILPILDPENRFFGKLLNNMSQPINDL |
| Bacteroides | 5 | MESIKNSQKSTGKTLQKDPPYFGLYLNMALLNVRKVENHIRKW |
| pyogenes | | LGDVALLPEKSGFHSLLTTDNLSSAKWTRFYYKSRKFLPFLEMF |
| (SEQ ID | | DSDKKSYENRRETAECLDTIDRQKISSLLKEVYGKLQDIRNAFS |
| No. 109) | | HYHIDDQSVKHTALIISSEMHRFIENAYSFALQKTRARFTGVFVE |
| | | TDFLQAEEKGDNKKFFAIGGNEGIKLKDNALIFLICLFLDREEAF |
| | | KFLSRATGFKSTKEKGFLAVRETFCALCCRQPHERLLSVNPREA |
| | | LLMDMLNELNRCPDILFEMLDEKDQKSFLPLLGEEEQAHILENS |
| | | LNDELCEAIDDPFEMIASLSKRVRYKNRFPYLMLRYIEEKNLLPF |
| | | IRFRIDLGCLELASYPKKMGEENNYERSVTDHAMAFGRLTDFH |
| | | NEDAVLQQITKGITDEVRFSLYAPRYAIYNNKIGFVRTSGSDKIS |
| | | FPTLKKKGGEGHCVAYTLQNTKSFGFISIYDLRKILLLSFLDKDK |
| | | AKNIVSGLLEQCEKHWKDLSENLFDAIRTELQKEFPVPLIRYTLP |
| | | RSKGGKLVSSKLADKQEKYESEFERRKEKLTEILSEKDFDLSQIP |
| | | RRMIDEWLNVLPTSREKKLKGYVETLKLDCRERLRVFEKREKG |
| | | EHPLPPRIGEMATDLAKDIIRMVIDQGVKQRITSAYYSEIQRCLA |
| | | QYAGDDNRRHLDSIIRELRLKDTKNGHPFLGKVLRPGLGHTEK |
| | | LYQRYFEEKKEWLEATFYPAASPKRVPRFVNPPTGKQKELPLII |
| | | RNLMKERPEWRDWKQRKNSHPIDLPSQLFENEICRLLKDKIGKE |
| | | PSGKLKWNEMFKLYWDKEFPNGMQRFYRCKRRVEVFDKVVE |
| | | YEYSEEGGNYKKYYEALIDEVVRQKISSSKEKSKLQVEDLTLSV |
| | | RRVFKRAINEKEYQLRLLCEDDRLLFMAVRDLYDWKEAQLDL |
| | | DKIDNMLGEPVSVSQVIQLEGGQPDAVIKAECKLKDVSKLMRY |
| | | CYDGRVKGLMPYFANHEATQEQVEMELRHYEDHRRRVFNWV |
| | | FALEKSVLKNEKLRRFYEESQGGCEHRRCIDALRKASLVSEEEY |
| | | EFLVHIRNKSAHNQFPDLEIGKLPPNVTSGFCECIWSKYKAIICRI |
| | | IPFIDPERRFFGKLLEQK |
| Alistipes | 6 | MSNEIGAFREHQFAYAPGNEKQEEATFATYFNLALSNVEGMMF |
| sp. | | GEVESNPDKIEKSLDTLPPAILRQIASFIWLSKEDHPDKAYSTEE |
| ZOR0009 | | VKVIVTDLVRRLCFYRNYFSHCFYLDTQYFYSDELVDTTAIGEK |
| (SEQ ID | | LPYNFHHFITNRLFRYSLPEITLFRWNEGERKYEILRDGLIFFCCL |
| No. 110) | | FLKRGQAERFLNELRFFKRTDEEGRIKRTIFTKYCTRESHKHIGIE |
| | | EQDFLIFQDIIGDLNRVPKVCDGVVDLSKENERYIKNRETSNESD |
| | | ENKARYRLLIREKDKFPYYLMRYIVDFGVLPCITFKQNDYSTKE |
| | | GRGQFHYQDAAVAQEERCYNFVVRNGNVYYSYMPQAQNVVR |
| | | ISELQGTISVEELRNMVYASINGKDVNKSVEQYLYHLHLLYEKI |
| | | LTISGQTIKEGRVDVEDYRPLLDKLLLRPASNGEELRRELRKLLP |
| | | KRVCDLLSNRFDCSEGVSAVEKRLKAILLRHEQLLLSQNPALHI |
| | | DKIKSVIDYLYLFFSDDEKFRQQPTEKAHRGLKDEEFQMYHYL |
| | | VGDYDSHPLALWKELEASGRLKPEMRKLTSATSLHGLYMLCL |
| | | KGTVEWCRKQLMSIGKGTAKVEAIADRVGLKLYDKLKEYTPE |
| | | QLEREVKLVVMHGYAAAATPKPKAQAAIPSKLTELRFYSFLGK |
| | | REMSFAAFIRQDKKAQKLWLRNFYTVENIKTLQKRQAAADAA |
| | | CKKLYNLVGEVERVHTNDKVLVLVAQRYRERLLNVGSKCAVT |
| | | LDNPERQQKLADVYEVQNAWLSIRFDDLDFTLTHVNLSNLRKA |
| | | YNLIPRKHILAFKEYLDNRVKQKLCEECRNVRRKEDLCTCCSPR |
| | | YSNLTSWLKENHSESSIEREAATMMLLDVERKLLSFLLDERRKA |
| | | IIEYGKFIPFSALVKECRLADAGLCGIRNDVLHDNVISYADAIGK |
| | | LSAYFPKEASEAVEYIRRTKEVREQRREELMANSSQ |
| Prevotella | 7a | MSKECKKQRQEKKRRLQKANFSISLTGKHVFGAYFNMARTNF |
| sp. | | VKTINYILPIAGVRGNYSENQINKMLHALFLIQAGRNEELTTEQK |
| MA2016 | | QWEKKLRLNPEQQTKFQKLLFKHFPVLGPMMADVADHKAYL |
| (SEQ ID | | NKKKSTVQTEDETFAMLKGVSLADCLDIICLMADTLTECRNFY |
| No. 111) | | THKDPYNKPSQLADQYLHQEMIAKKLDKVVVASRRILKDREGL |
| | | SVNEVEFLTGIDHLHQEVLKDEFGNAKVKDGKVMKTFVEYDD |
| | | FYFKISGKRLVNGYTVTTKDDKPVNVNTMLPALSDFGLLYFCV |
| | | LFLSKPYAKLFIDEVRLFEYSPFDDKENMIMSEMLSIYRIRTPRL |
| | | HKIDSHDSKATLAMDIFGELRRCPMELYNLLDKNAGQPFFHDE |
| | | VKHPNSHTPDVSKRLRYDDRFPTLALRYIDETELFKRIRFQLQL |
| | | GSFRYKFYDKENCIDGRVRVRRIQKEINGYGRMQEVADKRMD |
| | | KWGDLIQKREERSVKLEHEELYINLDQFLEDTADSTPYVTDRRP |
| | | AYNIHANRIGLYWEDSQNPKQYKVFDENGMYIPELVVTEDKKA |
| | | PIKMPAPRCALSVYDLPAMLFYEYLREQQDNEFPSAEQVIIEYE |
| | | DDYRKFFKAVAEGKLKPFKRPKEFRDFLKKEYPKLRMADIPKK |
| | | LQLFLCSHGLCYNNKPETVYERLDRLTLQHLEERELHIQNRLEH |
| | | YQKDRDMIGNKDNQYGKKSFSDVRHGALARYLAQSMMEWQP |
| | | TKLKDKEKGHDKLTGLNYNVLTAYLATYGHPQVPEEGFTPRTL |
| | | EQVLINAHLIGGSNPHPFINKVLALGNRNIEELYLHYLEEELKHI |
| | | RSRIQSLSSNPSDKALSALPFIHHDRMRYHERTSEEMMALAARY |
| | | TTIQLPDGLFTPYILEILQKHYTENSDLQNALSQDVPVKLNPTCN |
| | | AAYLITLFYQTVLKDNAQPFYLSDKTYTRNKDGEKAESFSFKR |
| | | AYELFSVLNNNKKDTFPFEMIPLFLTSDEIQERLSAKLLDGDGNP |
| | | VPEVGEKGKPATDSQGNTIWKRRIYSEVDDYAEKLTDRDMKIS |
| | | FKGEWEKLPRWKQDKIIKRRDETRRQMRDELLQRMPRYIRDIK |
| | | DNERTLRRYKTQDMVLFLLAEKMFTNIISEQSSEFNWKQMRLS |
| | | KVCNEAFLRQTLTFRVPVTVGETTIYVEQENMSLKNYGEFYRFL |
| | | TDDRLMSLLNNIVETLKPNENGDLVIRHTDLMSELAAYDQYRS |
| | | TIFMLIQSIENLIITNNAVLDDPDADGFWVREDLPKRNNFASLLE |
| | | LINQLNNVELTDDERKLLVAIRNAFSHNSYNIDFSLIKDVKHLPE |
| | | VAKGILQHLQSMLGVEITK |
| Prevotella | 7b | MSKECKKQRQEKKRRLQKANFSISLTGKHVFGAYFNMARTNF |
| sp. | | VKTINYILPIAGVRGNYSENQINKMLHALFLIQAGRNEELTTEQK |
| MA2016 | | QWEKKLRLNPEQQTKFQKLLFKHFPVLGPMMADVADHKAYL |
| (SEQ ID | | NKKKSTVQTEDETFAMLKGVSLADCLDIICLMADTLTECRNFY |
| No. 112) | | THKDPYNKPSQLADQYLHQEMIAKKLDKVVVASRRILKDREGL |
| | | SVNEVEFLTGIDHLHQEVLKDEFGNAKVKDGKVMKTFVEYDD |
| | | FYFKISGKRLVNGYTVTTKDDKPVNVNTMLPALSDFGLLYFCV |
| | | LFLSKPYAKLFIDEVRLFEYSPFDDKENMIMSEMLSIYRIRTPRL |
| | | HKIDSHDSKATLAMDIFGELRRCPMELYNLLDKNAGQPFFHDE |
| | | VKHPNSHTPDVSKRLRYDDRFPTLALRYIDETELFKRIRFQLQL |
| | | GSFRYKFYDKENCIDGRVRVRRIQKEINGYGRMQEVADKRMD |
| | | KWGDLIQKREERSVKLEHEELYINLDQFLEDTADSTPYVTDRRP |
| | | AYNIHANRIGLYWEDSQNPKQYKVFDENGMYIPELVVTEDKKA |
| | | PIKMPAPRCALSVYDLPAMLFYEYLREQQDNEFPSAEQVIIEYE |
| | | DDYRKFFKAVAEGKLKPFKRPKEFRDFLKKEYPKLRMADIPKK |
| | | LQLFLCSHGLCYNNKPETVYERLDRLTLQHLEERELHIQNRLEH |
| | | YQKDRDMIGNKDNQYGKKSFSDVRHGALARYLAQSMMEWQP |
| | | TKLKDKEKGHDKLTGLNYNVLTAYLATYGHPQVPEEGFTPRTL |
| | | EQVLINAHLIGGSNPHPFINKVLALGNRNIEELYLHYLEEELKHI |
| | | RSRIQSLSSNPSDKALSALPFIHHDRMRYHERTSEEMMALAARY |
| | | TTIQLPDGLFTPYILEILQKHYTENSDLQNALSQDVPVKLNPTCN |
| | | AAYLITLFYQTVLKDNAQPFYLSDKTYTRNKDGEKAESFSFKR |
| | | AYELFSVLNNNKKDTFPFEMIPLFLTSDEIQERLSAKLLDGDGNP |
| | | VPEVGEKGKPATDSQGNTIWKRRIYSEVDDYAEKLTDRDMKIS |
| | | FKGEWEKLPRWKQDKIIKRRDETRRQMRDELLQRMPRYIRDIK |
| | | DNERTLRRYKTQDMVLFLLAEKMFTNIISEQSSEFNWKQMRLS |
| | | KVCNEAFLRQTLTFRVPVTVGETTIYVEQENMSLKNYGEFYRFL |
| | | TDDRLMSLLNNIVETLKPNENGDLVIRHTDLMSELAAYDQYRS |
| | | TIFMLIQSIENLIITNNAVLDDPDADGFWVREDLPKRNNFASLLE |
| | | LINQLNNVELTDDERKLLVAIRNAFSHNSYNIDFSLIKDVKHLPE |
| | | VAKGILQHLQSMLGVEITK |
| Riemerella | 8 | MEKPLLPNVYTLKHKFFWGAFLNIARHNAFITICHINEQLGLKT |
| anatipestifer | | PSNDDKIVDVVCETWNNILNNDHDLLKKSQLTELILKHFPFLTA |
| (SEQ ID | | MCYHPPKKEGKKKGHQKEQQKEKESEAQSQAEALNPSKLIEAL |
| No. 113) | | EILVNQLHSLRNYYSHYKHKKPDAEKDIFKHLYKAFDASLRMV |
| | | KEDYKAHFTVNLTRDFAHLNRKGKNKQDNPDFNRYRFEKDGF |
| | | FTESGLLFFTNLFLDKRDAYWMLKKVSGFKASHKQREKMTTE |
| | | VFCRSRILLPKLRLESRYDHNQMLLDMLSELSRCPKLLYEKLSE |
| | | ENKKHFQVEADGFLDEIEEEQNPFKDTLIRHQDRFPYFALRYLD |
| | | LNESFKSIRFQVDLGTYHYCIYDKKIGDEQEKRHLTRTLLSFGRL |
| | | QDFTEINRPQEWKALTKDLDYKETSNQPFISKTTPHYHITDNKIG |
| | | FRLGTSKELYPSLEIKDGANRIAKYPYNSGFVAHAFISVHELLPL |
| | | MFYQHLTGKSEDLLKETVRHIQRIYKDFEEERINTIEDLEKANQ |
| | | GRLPLGAFPKQMLGLLQNKQPDLSEKAKIKIEKLIAETKLLSHR |
| | | LNTKLKSSPKLGKRREKLIKTGVLADWLVKDFMRFQPVAYDA |
| | | QNQPIKSSKANSTEFWFIRRALALYGGEKNRLEGYFKQTNLIGN |
| | | TNPHPFLNKFNWKACRNLVDFYQQYLEQREKFLEAIKNQPWEP |
| | | YQYCLLLKIPKENRKNLVKGWEQGGISLPRGLFTEAIRETLSED |
| | | LMLSKPIRKEIKKHGRVGFISRAITLYFKEKYQDKHQSFYNLSY |
| | | KLEAKAPLLKREEHYEYWQQNKPQSPTESQRLELHTSDRWKD |
| | | YLLYKRWQHLEKKLRLYRNQDVMLWLMTLELTKNHFKELNL |
| | | NYHQLKLENLAVNVQEADAKLNPLNQTLPMVLPVKVYPATAF |
| | | GEVQYHKTPIRTVYIREEHTKALKMGNFKALVKDRRLNGLFSFI |
| | | KEENDTQKHPISQLRLRRELEIYQSLRVDAFKETLSLEEKLLNKH |
| | | TSLSSLENEFRALLEEWKKEYAASSMVTDEHIAFIASVRNAFCH |
| | | NQYPFYKEALHAPIPLFTVAQPTTEEKDGLGIAEALLKVLREYC |
| | | EIVKSQI |
| Prevotella | 9 | MEDDKKTTGSISYELKDKHFWAAFLNLARHNVYITINHINKLLE |
| aurantiaca | | IREIDNDEKVLDIKTLWQKGNKDLNQKARLRELMTKHFPFLET |
| (SEQ ID | | AIYTKNKEDKKEVKQEKQAEAQSLESLKDCLFLFLDKLQEARN |
| No. 114) | | YYSHYKYSEFSKEPEFEEGLLEKMYNIFGNNIQLVINDYQHNKD |
| | | INPDEDFKHLDRKGQFKYSFADNEGNITESGLLFFVSLFLEKKD |
| | | AIWMQQKLNGFKDNLENKKKMTHEVFCRSRILMPKLRLESTQT |
| | | QDWILLDMLNELIRCPKSLYERLQGDDREKFKVPFDPADEDYN |
| | | AEQEPFKNTLIRHQDRFPYFVLRYFDYNEIFKNLRFQIDLGTYHF |
| | | SIYKKLIGGQKEDRHLTHKLYGFERIQEFAKQNRPDEWKAIVKD |
| | | LDTYETSNKRYISETTPHYHLENQKIGIRFRNGNKEIWPSLKTND |
| | | ENNEKSKYKLDKQYQAEAFLSVHELLPMMFYYLLLKKEKPNN |
| | | DEINASIVEGFIKREIRNIFKLYDAFANGEINNIDDLEKYCADKGI |
| | | PKRHLPKQMVAILYDEHKDMVKEAKRKQKEMVKDTKKLLAT |
| | | LEKQTQKEKEDDGRNVKLLKSGEIARWLVNDMMRFQPVQKD |
| | | NEGKPLNNSKANSTEYQMLQRSLALYNNEEKPTRYFRQVNLIE |
| | | SNNPHPFLKWTKWEECNNILTFYYSYLTKKIEFLNKLKPEDWK |
| | | KNQYFLKLKEPKTNRETLVQGWKNGFNLPRGIFTEPIREWFKR |
| | | HQNNSKEYEKVEALDRVGLVTKVIPLFFKEEYFKDKEENFKED |
| | | TQKEINDCVQPFYNFPYNVGNIHKPKEKDFLHREERIELWDKKK |
| | | DKFKGYKEKIKSKKLTEKDKEEFRSYLEFQSWNKFERELRLVR |
| | | NQDIVTWLLCKELIDKLKIDELNIEELKKLRLNNIDTDTAKKEK |
| | | NNILNRVMPMELPVTVYEIDDSHKIVKDKPLHTIYIKEAETKLL |
| | | KQGNFKALVKDRRLNGLFSFVKTNSEAESKRNPISKLRVEYELG |
| | | EYQEARIEIIQDMLALEEKLINKYKDLPTNKFSEMLNSWLEGKD |
| | | EADKARFQNDVDFLIAVRNAFSHNQYPMHNKIEFANIKPFSLYT |
| | | ANNSEEKGLGIANQLKDKTKETTDKIKKIEKPIETKE |
| Prevotella | 10 | MEDKPFWAAFFNLARHNVYLTVNHINKLLDLEKLYDEGKHKEI |
| saccharolytica | | FEREDIFNISDDVMNDANSNGKKRKLDIKKIWDDLDTDLTRKY |
| (SEQ | | QLRELILKHFPFIQPAIIGAQTKERTTIDKDKRSTSTSNDSLKQTG |
| ID No. | | EGDINDLLSLSNVKSMFFRLLQILEQLRNYYSHVKHSKSATMPN |
| 115) | | FDEDLLNWMRYIFIDSVNKVKEDYSSNSVIDPNTSFSHLIYKDE |
| | | QGKIKPCRYPFTSKDGSINAFGLLFFVSLFLEKQDSIWMQKKIPG |
| | | FKKASENYMKMTNEVFCRNHILLPKIRLETVYDKDWMLLDML |
| | | NEVVRCPLSLYKRLTPAAQNKFKVPEKSSDNANRQEDDNPFSRI |
| | | LVRHQNRFPYFVLRFFDLNEVFTTLRFQINLGCYHFAICKKQIGD |
| | | KKEVHHLIRTLYGFSRLQNFTQNTRPEEWNTLVKTTEPSSGNDG |
| | | KTVQGVPLPYISYTIPHYQIENEKIGIKIFDGDTAVDTDIWPSVST |
| | | EKQLNKPDKYTLTPGFKADVFLSVHELLPMMFYYQLLLCEGML |
| | | KTDAGNAVEKVLIDTRNAIFNLYDAFVQEKINTITDLENYLQDK |
| | | PILIGHLPKQMIDLLKGHQRDMLKAVEQKKAMLIKDTERRLKL |
| | | LDKQLKQETDVAAKNTGTLLKNGQIADWLVNDMMRFQPVKR |
| | | DKEGNPINCSKANSTEYQMLQRAFAFYATDSCRLSRYFTQLHLI |
| | | HSDNSHLFLSRFEYDKQPNLIAFYAAYLKAKLEFLNELQPQNW |
| | | ASDNYFLLLRAPKNDRQKLAEGWKNGFNLPRGLFTEKIKTWFN |
| | | EHKTIVDISDCDIFKNRVGQVARLIPVFFDKKFKDHSQPFYRYDF |
| | | NVGNVSKPTEANYLSKGKREELFKSYQNKFKNNIPAEKTKEYR |
| | | EYKNFSLWKKFERELRLIKNQDILIWLMCKNLFDEKIKPKKDIL |
| | | EPRIAVSYIKLDSLQTNTSTAGSLNALAKVVPMTLAIHIDSPKPK |
| | | GKAGNNEKENKEFTVYIKEEGTKLLKWGNFKTLLADRRIKGLF |
| | | SYIEHDDIDLKQHPLTKRRVDLELDLYQTCRIDIFQQTLGLEAQL |
| | | LDKYSDLNTDNFYQMLIGWRKKEGIPRNIKEDTDFLKDVRNAF |
| | | SHNQYPDSKKIAFRRIRKFNPKELILEEEEGLGIATQMYKEVEKV |
| | | VNRIKRIELFD |
| HMPREF9712_03108 | 11 | MKDILTTDTTEKQNRFYSHKIADKYFFGGYFNLASNNIYEVFEE |
| [Myroides | | VNKRNTFGKLAKRDNGNLKNYIIHVFKDELSISDFEKRVAIFAS |
| odoratimimus | | YFPILETVDKKSIKERNRTIDLTLSQRIRQFREMLISLVTAVDQLR |
| CCUG 10230] | | NFYTHYHHSDIVIENKVLDFLNSSFVSTALHVKDKYLKTDKTKE |
| (SEQ ID | | FLKETIAAELDILIEAYKKKQIEKKNTRFKANKREDILNAIYNEA |
| No. 116) | | FWSFINDKDKDKDKETVVAKGADAYFEKNHHKSNDPDFALNIS |
| | | EKGIVYLLSFFLTNKEMDSLKANLTGFKGKVDRESGNSIKYMA |
| | | TQRIYSFHTYRGLKQKIRTSEEGVKETLLMQMIDELSKVPNVVY |
| | | QHLSTTQQNSFIEDWNEYYKDYEDDVETDDLSRVIHPVIRKRYE |
| | | DRFNYFAIRFLDEFFDFPTLRFQVHLGDYVHDRRTKQLGKVESD |
| | | RIIKEKVTVFARLKDINSAKASYFHSLEEQDKEELDNKWTLFPN |
| | | PSYDFPKEHTLQHQGEQKNAGKIGIYVKLRDTQYKEKAALEEA |
| | | RKSLNPKERSATKASKYDIITQIIEANDNVKSEKPLVFTGQPIAY |
| | | LSMNDIHSMLFSLLTDNAELKKTPEEVEAKLIDQIGKQINEILSK |
| | | DTDTKILKKYKDNDLKETDTDKITRDLARDKEEIEKLILEQKQR |
| | | ADDYNYTSSTKFNIDKSRKRKHLLFNAEKGKIGVWLANDIKRF |
| | | MFKESKSKWKGYQHTELQKLFAYFDTSKSDLELILSNMVMVK |
| | | DYPIELIDLVKKSRTLVDFLNKYLEARLEYIENVITRVKNSIGTP |
| | | QFKTVRKECFTFLKKSNYTVVSLDKQVERILSMPLFIERGFMDD |
| | | KPTMLEGKSYKQHKEKFADWFVHYKENSNYQNFYDTEVYEIT |
| | | TEDKREKAKVTKKIKQQQKNDVFTLMMVNYMLEEVLKLSSND |
| | | RLSLNELYQTKEERIVNKQVAKDTQERNKNYIWNKVVDLQLC |
| | | DGLVHIDNVKLKDIGNFRKYENDSRVKEFLTYQSDIVWSAYLS |
| | | NEVDSNKLYVIERQLDNYESIRSKELLKEVQEIECSVYNQVANK |
| | | ESLKQSGNENFKQYVLQGLLPIGMDVREMLILSTDVKFKKEEII |
| | | QLGQAGEVEQDLYSLIYIRNKFAHNQLPIKEFFDFCENNYRSISD |
| | | NEYYAEYYMEIFRSIKEKYAN |
| Prevotella | 12 | MEDDKKTTDSIRYELKDKHFWAAFLNLARHNVYITVNHINKIL |
| intermedia | | EEDEINRDGYENTLENSWNEIKDINKKDRLSKLIIKHFPFLEATT |
| (SEQ ID | | YRQNPTDTTKQKEEKQAEAQSLESLKKSFFVFIYKLRDLRNHYS |
| No. 117) | | HYKHSKSLERPKFEEDLQNKMYNIFDVSIQFVKEDYKHNTDINP |
| | | KKDFKHLDRKRKGKFHYSFADNEGNITESGLLFFVSLFLEKKDA |
| | | IWVQKKLEGFKCSNKSYQKMTNEVFCRSRMLLPKLRLESTQTQ |
| | | DWILLDMLNELIRCPKSLYERLQGVNRKKFYVSFDPADEDYDA |
| | | EQEPFKNTLVRHQDRFPYFALRYFDYNEVFANLRFQIDLGTYHF |
| | | SIYKKLIGGQKEDRHLTHKLYGFERIQEFDKQNRPDEWKAIVKD |
| | | SDTFKKKEEKEEEKPYISETTPHYHLENKKIGIAFKNHNIWPSTQ |
| | | TELTNNKRKKYNLGTSIKAEAFLSVHELLPMMFYYLLLKTENT |
| | | KNDNKVGGKKETKKQGKHKIEAIIESKIKDIYALYDAFANGEIN |
| | | SEDELKEYLKGKDIKIVHLPKQMIAILKNEHKDMAEKAEAKQE |
| | | KMKLATENRLKTLDKQLKGKIQNGKRYNSAPKSGEIASWLVN |
| | | DMMRFQPVQKDENGESLNNSKANSTEYQLLQRTLAFFGSEHER |
| | | LAPYFKQTKLIESSNPHPFLNDTEWEKCSNILSFYRSYLKARKNF |
| | | LESLKPEDWEKNQYFLMLKEPKTNRETLVQGWKNGFNLPRGFF |
| | | TEPIRKWFMEHWKSIKVDDLKRVGLVAKVTPLFFSEKYKDSVQ |
| | | PFYNYPFNVGDVNKPKEEDFLHREERIELWDKKKDKFKGYKA |
| | | KKKFKEMTDKEKEEHRSYLEFQSWNKFERELRLVRNQDIVTWL |
| | | LCTELIDKLKIDELNIKELKKLRLKDINTDTAKKEKNNILNRVMP |
| | | MELPVTVYKVNKGGYIIKNKPLHTIYIKEAETKLLKQGNFKALV |
| | | KDRRLNGLFSFVKTPSEAESESNPISKLRVEYELGKYQNARLDII |
| | | EDMLALEKKLIDKYNSLDTDNFHNMLTGWLELKGEAKKARFQ |
| | | NDVKLLTAVRNAFSHNQYPMYDENLFGNIERFSLSSSNIIESKGL |
| | | DIAAKLKEEVSKAAKKIQNEEDNKKEKET |
| Capnocytophaga | 13 | MKNIQRLGKGNEFSPFKKEDKFYFGGFLNLANNNIEDFFKEIITR |
| canimorsus | | FGIVITDENKKPKETFGEKILNEIFKKDISIVDYEKWVNIFADYFP |
| (SEQ ID | | FTKYLSLYLEEMQFKNRVICFRDVMKELLKTVEALRNFYTHYD |
| No. 118) | | HEPIKIEDRVFYFLDKVLLDVSLTVKNKYLKTDKTKEFLNQHIG |
| | | EELKELCKQRKDYLVGKGKRIDKESEIINGIYNNAFKDFICKREK |
| | | QDDKENHNSVEKILCNKEPQNKKQKSSATVWELCSKSSSKYTE |
| | | KSFPNRENDKHCLEVPISQKGIVFLLSFFLNKGEIYALTSNIKGFK |
| | | AKITKEEPVTYDKNSIRYMATHRMFSFLAYKGLKRKIRTSEINY |
| | | NEDGQASSTYEKETLMLQMLDELNKVPDVVYQNLSEDVQKTFI |
| | | EDWNEYLKENNGDVGTMEEEQVIHPVIRKRYEDKFNYFAIRFL |
| | | DEFAQFPTLRFQVHLGNYLCDKRTKQICDTTTEREVKKKITVFG |
| | | RLSELENKKAIFLNEREEIKGWEVFPNPSYDFPKENISVNYKDFP |
| | | IVGSILDREKQPVSNKIGIRVKIADELQREIDKAIKEKKLRNPKNR |
| | | KANQDEKQKERLVNEIVSTNSNEQGEPVVFIGQPTAYLSMNDIH |
| | | SVLYEFLINKISGEALETKIVEKIETQIKQIIGKDATTKILKPYTNA |
| | | NSNSINREKLLRDLEQEQQILKTLLEEQQQREKDKKDKKSKRK |
| | | HELYPSEKGKVAVWLANDIKRFMPKAFKEQWRGYHHSLLQKY |
| | | LAYYEQSKEELKNLLPKEVFKHFPFKLKGYFQQQYLNQFYTDY |
| | | LKRRLSYVNELLLNIQNFKNDKDALKATEKECFKFFRKQNYIIN |
| | | PINIQIQSILVYPIFLKRGFLDEKPTMIDREKFKENKDTELADWF |
| | | MHYKNYKEDNYQKFYAYPLEKVEEKEKFKRNKQINKQKKND |
| | | VYTLMMVEYIIQKIFGDKFVEENPLVLKGIFQSKAERQQNNTHA |
| | | ATTQERNLNGILNQPKDIKIQGKITVKGVKLKDIGNFRKYEIDQR |
| | | VNTFLDYEPRKEWMAYLPNDWKEKEKQGQLPPNNVIDRQISK |
| | | YETVRSKILLKDVQELEKIISDEIKEEHRHDLKQGKYYNFKYYIL |
| | | NGLLRQLKNENVENYKVFKLNTNPEKVNITQLKQEATDLEQKA |
| | | FVLTYIRNKFAHNQLPKKEFWDYCQEKYGKIEKEKTYAEYFAE |
| | | VFKREKEALIK |
| Porphyromonas | 14 | MTEQSERPYNGTYYTLEDKHFWAAFLNLARHNAYITLTHIDRQ |
| gulae | | LAYSKADITNDQDVLSFKALWKNFDNDLERKSRLRSLILKHFSF |
| (SEQ ID | | LEGAAYGKKLFESKSSGNKSSKNKELTKKEKEELQANALSLDN |
| No. 119) | | LKSILFDFLQKLKDFRNYYSHYRHSGSSELPLFDGNMLQRLYNV |
| | | FDVSVQRVKIDHEHNDEVDPHYHFNHLVRKGKKDRYGHNDNP |
| | | SFKHHFVDGEGMVTEAGLLFFVSLFLEKRDAIWMQKKIRGFKG |
| | | GTETYQQMTNEVFCRSRISLPKLKLESLRMDDWMLLDMLNEL |
| | | VRCPKPLYDRLREDDRACFRVPVDILPDEDDTDGGGEDPFKNT |
| | | LVRHQDRFPYFALRYFDLKKVFTSLRFHIDLGTYHFAIYKKMIG |
| | | EQPEDRHLTRNLYGFGRIQDFAEEHRPEEWKRLVRDLDYFETG |
| | | DKPYISQTSPHYHIEKGKIGLRFMPEGQHLWPSPEVGTTRTGRS |
| | | KYAQDKRLTAEAFLSVHELMPMMFYYFLLREKYSEEVSAERV |
| | | QGRIKRVIEDVYAVYDAFARDEINTRDELDACLADKGIRRGHLP |
| | | RQMIAILSQEHKDMEEKIRKKLQEMMADTDHRLDMLDRQTDR |
| | | KIRIGRKNAGLPKSGVIADWLVRDMMRFQPVAKDASGKPLNNS |
| | | KANSTEYRMLQRALALFGGEKERLTPYFRQMNLTGGNNPHPFL |
| | | HETRWESHTNILSFYRSYLRARKAFLERIGRSDRVENRPFLLLKE |
| | | PKTDRQTLVAGWKGEFHLPRGIFTEAVRDCLIEMGHDEVASYK |
| | | EVGFMAKAVPLYFERACEDRVQPFYDSPFNVGNSLKPKKGRFL |
| | | SKEERAEEWERGKERFRDLEAWSYSAARRIEDAFAGIEYASPG |
| | | NKKKIEQLLRDLSLWEAFESKLKVRADRINLAKLKKEILEAQEH |
| | | PYHDFKSWQKFERELRLVKNQDIITWMMCRDLMEENKVEGLD |
| | | TGTLYLKDIRPNVQEQGSLNVLNRVKPMRLPVVVYRADSRGH |
| | | VHKEEAPLATVYIEERDTKLLKQGNFKSFVKDRRLNGLFSFVDT |
| | | GGLAMEQYPISKLRVEYELAKYQTARVCVFELTLRLEESLLTRY |
| | | PHLPDESFREMLESWSDPLLAKWPELHGKVRLLIAVRNAFSHN |
| | | QYPMYDEAVFSSIRKYDPSSPDAIEERMGLNIAHRLSEEVKQAK |
| | | ETVERIIQA |
| Prevotella | 15 | MNIPALVENQKKYFGTYSVMAMLNAQTVLDHIQKVADIEGEQ |
| sp. P5-125 | | NENNENLWFHPVMSHLYNAKNGYDKQPEKTMFIIERLQSYFPF |
| (SEQ ID | | LKIMAENQREYSNGKYKQNRVEVNSNDIFEVLKRAFGVLKMY |
| No. 120) | | RDLTNHYKTYEEKLNDGCEFLTSTEQPLSGMINNYYTVALRNM |
| | | NERYGYKTEDLAFIQDKRFKFVKDAYGKKKSQVNTGFFLSLQD |
| | | YNGDTQKKLHLSGVGIALLICLFLDKQYINIFLSRLPIFSSYNAQS |
| | | EERRIIIRSFGINSIKLPKDRIHSEKSNKSVAMDMLNEVKRCPDEL |
| | | FTTLSAEKQSRFRIISDDHNEVLMKRSSDRFVPLLLQYIDYGKLF |
| | | DHIRFHVNMGKLRYLLKADKTCIDGQTRVRVIEQPLNGFGRLE |
| | | EAETMRKQENGTFGNSGIRIRDFENMKRDDANPANYPYIVDTY |
| | | THYILENNKVEMFINDKEDSAPLLPVIEDDRYVVKTIPSCRMSTL |
| | | EIPAMAFHMFLFGSKKTEKLIVDVHNRYKRLFQAMQKEEVTAE |
| | | NIASFGIAESDLPQKILDLISGNAHGKDVDAFIRLTVDDMLTDTE |
| | | RRIKRFKDDRKSIRSADNKMGKRGFKQISTGKLADFLAKDIVLF |
| | | QPSVNDGENKITGLNYRIMQSAIAVYDSGDDYEAKQQFKLMFE |
| | | KARLIGKGTTEPHPFLYKVFARSIPANAVEFYERYLIERKFYLTG |
| | | LSNEIKKGNRVDVPFIRRDQNKWKTPAMKTLGRIYSEDLPVELP |
| | | RQMFDNEIKSHLKSLPQMEGIDFNNANVTYLIAEYMKRVLDDD |
| | | FQTFYQWNRNYRYMDMLKGEYDRKGSLQHCFTSVEEREGLW |
| | | KERASRTERYRKQASNKIRSNRQMRNASSEEIETILDKRLSNSR |
| | | NEYQKSEKVIRRYRVQDALLFLLAKKTLTELADFDGERFKLKEI |
| | | MPDAEKGILSEIMPMSFTFEKGGKKYTITSEGMKLKNYGDFFVL |
| | | ASDKRIGNLLELVGSDIVSKEDIMEEFNKYDQCRPEISSIVFNLE |
| | | KWAFDTYPELSARVDREEKVDFKSILKILLNNKNINKEQSDILR |
| | | KIRNAFDHNNYPDKGVVEIKALPEIAMSIKKAFGEYAIMK |
| Flavobacterium | 16 | MENLNKILDKENEICISKIFNTKGIAAPITEKALDNIKSKQKNDL |
| branchiophilum | | NKEARLHYFSIGHSFKQIDTKKVFDYVLIEELKDEKPLKFITLQK |
| (SEQ | | DFFTKEFSIKLQKLINSIRNINNHYVHNFNDINLNKIDSNVFHFLK |
| ID No. | | ESFELAIIEKYYKVNKKYPLDNEIVLFLKELFIKDENTALLNYFT |
| 121) | | NLSKDEAIEYILTFTITENKIWNINNEHNILNIEKGKYLTFEAMLF |
| | | LITIFLYKNEANHLLPKLYDFKNNKSKQELFTFFSKKFTSQDIDA |
| | | EEGHLIKFRDMIQYLNHYPTAWNNDLKLESENKNKIMTTKLIDS |
| | | IIEFELNSNYPSFATDIQFKKEAKAFLFASNKKRNQTSFSNKSYN |
| | | EEIRHNPHIKQYRDEIASALTPISFNVKEDKFKIFVKKHVLEEYFP |
| | | NSIGYEKFLEYNDFTEKEKEDFGLKLYSNPKTNKLIERIDNHKL |
| | | VKSHGRNQDRFMDFSMRFLAENNYFGKDAFFKCYKFYDTQEQ |
| | | DEFLQSNENNDDVKFHKGKVTTYIKYEEHLKNYSYWDCPFVEE |
| | | NNSMSVKISIGSEEKILKIQRNLMIYFLENALYNENVENQGYKL |
| | | VNNYYRELKKDVEESIASLDLIKSNPDFKSKYKKILPKRLLHNY |
| | | APAKQDKAPENAFETLLKKADFREEQYKKLLKKAEHEKNKED |
| | | FVKRNKGKQFKLHFIRKACQMMYFKEKYNTLKEGNAAFEKKD |
| | | PVIEKRKNKEHEFGHHKNLNITREEFNDYCKWMFAFNGNDSYK |
| | | KYLRDLFSEKHFFDNQEYKNLFESSVNLEAFYAKTKELFKKWIE |
| | | TNKPTNNENRYTLENYKNLILQKQVFINVYHFSKYLIDKNLLNS |
| | | ENNVIQYKSLENVEYLISDFYFQSKLSIDQYKTCGKLFNKLKSN |
| | | KLEDCLLYEIAYNYIDKKNVHKIDIQKILTSKIILTINDANTPYKIS |
| | | VPFNKLERYTEMIAIKNQNNLKARFLIDLPLYLSKNKIKKGKDS |
| | | AGYEIIIKNDLEIEDINTINNKIINDSVKFTEVLMELEKYFILKDKC |
| | | ILSKNYIDNSEIPSLKQFSKVWIKENENEIINYRNIACHFHLPLLET |
| | | FDNLLLNVEQKFIKEELQNVSTINDLSKPQEYLILLFIKFKHNNF |
| | | YLNLFNKNESKTIKNDKEVKKNRVLQKFINQVILKKK |
| Myroides | 17 | MKDILTTDTTEKQNRFYSHKIADKYFFGGYFNLASNNIYEVFEE |
| odoratimimus | | VNKRNTFGKLAKRDNGNLKNYIIHVFKDELSISDFEKRVAIFAS |
| (SEQ ID | | YFPILETVDKKSIKERNRTIDLTLSQRIRQFREMLISLVTAVDQLR |
| No. 122) | | NFYTHYHHSDIVIENKVLDFLNSSFVSTALHVKDKYLKTDKTKE |
| | | FLKETIAAELDILIEAYKKKQIEKKNTRFKANKREDILNAIYNEA |
| | | FWSFINDKDKDKDKETVVAKGADAYFEKNHHKSNDPDFALNIS |
| | | EKGIVYLLSFFLTNKEMDSLKANLTGFKGKVDRESGNSIKYMA |
| | | TQRIYSFHTYRGLKQKIRTSEEGVKETLLMQMIDELSKVPNVVY |
| | | QHLSTTQQNSFIEDWNEYYKDYEDDVETDDLSRVTHPVIRKRY |
| | | EDRFNYFAIRFLDEFFDFPTLRFQVEILGDYVHDRRTKQLGKVES |
| | | DRIIKEKVTVFARLKDINSAKASYFHSLEEQDKEELDNKWTLFP |
| | | NPSYDFPKEHTLQHQGEQKNAGKIGIYVKLRDTQYKEKAALEE |
| | | ARKSLNPKERSATKASKYDIITQIIEANDNVKSEKPLVFTGQPIA |
| | | YLSMNDIHSMLFSLLTDNAELKKTPEEVEAKLIDQIGKQINEILS |
| | | KDTDTKILKKYKDNDLKETDTDKITRDLARDKEEIEKLILEQKQ |
| | | RADDYNYTSSTKFNIDKSRKRKHLLFNAEKGKIGVWLANDIKR |
| | | FMFKESKSKWKGYQHIELQKLFAYFDTSKSDLELILSNMVMVK |
| | | DYPIELIDLVKKSRTLVDFLNKYLEARLEYIENVITRVKNSIGTP |
| | | QFKTVRKECFTFLKKSNYTVVSLDKQVERILSMPLFIERGFMDD |
| | | KPTMLEGKSYKQHKEKFADWFVHYKENSNYQNFYDTEVYEIT |
| | | TEDKREKAKVTKKIKQQQKNDVFTLMMVNYMLEEVLKLSSND |
| | | RLSLNELYQTKEERIVNKQVAKDTQERNKNYIWNKVVDLQLC |
| | | DGLVHIDNVKLKDIGNFRKYENDSRVKEFLTYQSDIVWSAYLS |
| | | NEVDSNKLYVIERQLDNYESIRSKELLKEVQEIECSVYNQVANK |
| | | ESLKQSGNENFKQYVLQGLLPIGMDVREMLILSTDVKFKKEEII |
| | | QLGQAGEVEQDLYSLIYIRNKFAHNQLPIKEFFDFCENNYRSISD |
| | | NEYYAEYYMEIFRSIKEKYAN |
| Flavobacterium | 18 | MSSKNESYNKQKTFNHYKQEDKYFFGGFLNNADDNLRQVGKE |
| columnare | | FKTRINFNRNNNELASVFKDYFNKEKSVAKREHALNLLSNYFP |
| (SEQ ID | | VLERIQKHTNHNFEQTREIFELLLDTIKKLRDYYTHHYHKPITIN |
| No. 123) | | PKIYDFLDDTLLDVLITIKKKKVKNDTSRELLKEKLRPELTQLKN |
| | | QKREELIKKGKKLLEENLENAVFNHCLIPFLEENKTDDKQNKTV |
| | | SLRKYRKSKPNEETSITLTQSGLVFLMSFFLHRKEFQVFTSGLER |
| | | FKAKVNTIKEEEISLNKNNIVYMITHWSYSYYNFKGLKHRIKTD |
| | | QGVSTLEQNNTTHSLTNTNTKEALLTQIVDYLSKVPNEIYETLSE |
| | | KQQKEFEEDINEYMRENPENEDSTFSSIVSHKVIRKRYENKFNY |
| | | FAMRFLDEYAELPTLRFMVNFGDYIKDRQKKILESIQFDSERIIK |
| | | KEIHLFEKLSLVTEYKKNVYLKETSNIDLSRFPLFPNPSYVMAN |
| | | NNIPFYIDSRSNNLDEYLNQKKKAQSQNKKRNLTFEKYNKEQS |
| | | KDAIIAMLQKEIGVKDLQQRSTIGLLSCNELPSMLYEVIVKDIKG |
| | | AELENKIAQKIREQYQSIRDFTLDSPQKDNIPTTLIKTINTDSSVT |
| | | FENQPIDIPRLKNALQKELTLTQEKLLNVKEHEIEVDNYNRNKN |
| | | TYKFKNQPKNKVDDKKLQRKYVFYRNEIRQEANWLASDLIHF |
| | | MKNKSLWKGYMHNELQSFLAFFEDKKNDCIALLETVFNLKED |
| | | CILTKGLKNLFLKHGNFIDFYKEYLKLKEDFLSTESTFLENGFIG |
| | | LPPKILKKELSKRLKYIFIVFQKRQFIIKELEEKKNNLYADAINLS |
| | | RGIFDEKPTMIPFKKPNPDEFASWFVASYQYNNYQSFYELTPDI |
| | | VERDKKKKYKNLRAINKVKIQDYYLKLMVDTLYQDLFNQPLD |
| | | KSLSDFYVSKAEREKIKADAKAYQKLNDSSLWNKVIHLSLQNN |
| | | RITANPKLKDIGKYKRALQDEKIATLLTYDARTWTYALQKPEK |
| | | ENENDYKELHYTALNMELQEYEKVRSKELLKQVQELEKKILDK |
| | | FYDFSNNASHPEDLEIEDKKGKRHPNFKLYITKALLKNESEIINL |
| | | ENIDIEILLKYYDYNTEELKEKIKNMDEDEKAKIINTKENYNKIT |
| | | NVLIKKALVLIIIRNKMAHNQYPPKFIYDLANRFVPKKEEEYFAT |
| | | YFNRVFETITKELWENKEKKDKTQV |
| Porphyromonas | 19 | MTEQNEKPYNGTYYTLEDKHFWAAFLNLARHNAYITLAHIDR |
| gingivalis | | QLAYSKADITNDEDILFFKGQWKNLDNDLERKARLRSLILKHFS |
| (SEQ ID | | FLEGAAYGKKLFESQSSGNKSSKKKELSKKEKEELQANALSLD |
| No. 124) | | NLKSILFDFLQKLKDFRNYYSHYRHPESSELPLFDGNMLQRLYN |
| | | VFDVSVQRVKRDHEHNDKVDPHRHFNHLVRKGKKDKYGNND |
| | | NPFFKHHFVDREGTVTEAGLLFFVSLFLEKRDAIWMQKKIRGFK |
| | | GGTEAYQQMTNEVFCRSRISLPKLKLESLRTDDWMLLDMLNEL |
| | | VRCPKSLYDRLREEDRARFRVPVDILSDEDDTDGTEEDPFKNTL |
| | | VRHQDRFPYFALRYFDLKKVFTSLRFHIDLGTYHFAIYKKNIGE |
| | | QPEDRHLTRNLYGFGRIQDFAEEHRPEEWKRLVRDLDYFETGD |
| | | KPYITQTTPHYHIEKGKIGLRFVPEGQHLWPSPEVGATRTGRSK |
| | | YAQDKRLTAEAFLSVHELMPMMFYYFLLREKYSEEVSAEKVQ |
| | | GRIKRVIEDVYAVYDAFARDEINTRDELDACLADKGIRRGHLPR |
| | | QMIAILSQEHKDMEEKVRKKLQEMIADTDHRLDMLDRQTDRKI |
| | | RIGRKNAGLPKSGVVADWLVRDMMRFQPVAKDTSGKPLNNSK |
| | | ANSTEYRMLQRALALFGGEKERLTPYFRQMNLTGGNNPHPFLH |
| | | ETRWESHTNILSFYRSYLEARKAFLQSIGRSDRVENHRFLLLKEP |
| | | KTDRQTLVAGWKGEFHLPRGIFTEAVRDCLIEMGYDEVGSYKE |
| | | VGFMAKAVPLYFERASKDRVQPFYDYPFNVGNSLKPKKGRFLS |
| | | KEKRAEEWESGKERFRLAKLKKEILEAKEHPYHDFKSWQKFER |
| | | ELRLVKNQDIITWMMCRDLMEENKVEGLDTGTLYLKDIRTDV |
| | | QEQGSLNVLNRVKPMRLPVVVYRADSRGHVHKEQAPLATVYI |
| | | EERDTKLLKQGNFKSFVKDRRLNGLFSFVDTGALAMEQYPISK |
| | | LRVEYELAKYQTARVCAFEQTLELEESLLTRYPHLPDKNFRKM |
| | | LESWSDPLLDKWPDLHGNVRLLIAVRNAFSHNQYPMYDETLFS |
| | | SIRKYDPSSPDAIEERMGLNIAHRLSEEVKQAKEMVERIIQA |
| Porphyromonas | 20 | MTEQSERPYNGTYYTLEDKHFWAAFLNLARHNAYITLTHIDRQ |
| sp. | | LAYSKADITNDQDVLSFKALWKNFDNDLERKSRLRSLILKHFSF |
| COT-052 | | LEGAAYGKKLFESKSSGNKSSKNKELTKKEKEELQANALSLDN |
| OH4946 | | LKSILFDFLQKLKDFRNYYSHYRHSESSELPLFDGNMLQRLYNV |
| (SEQ ID | | FDVSVQRVKRDHEHNDKVDPHRHFNHLVRKGKKDRYGHNDN |
| No. 125) | | PSFKHHFVDSEGMVTEAGLLFFVSLFLEKRDAIWMQKKIRGFK |
| | | GGTETYQQMTNEVFCRSRISLPKLKLESLRTDDWMLLDMLNEL |
| | | VRCPKPLYDRLREDDRACFRVPVDILPDEDDTDGGGEDPFKNT |
| | | LVRHQDRFPYFALRYFDLKKVFTSLRFHIDLGTYHFAIYKKMIG |
| | | EQPEDRHLTRNLYGFGRIQDFAEEHRPEEWKRLVRDLDYFETG |
| | | DKPYISQTTPHYHIEKGKIGLRFVPEGQHLWPSPEVGTTRTGRSK |
| | | YAQDKRLTAEAFLSVHELMPMMFYYFLLREKYSEEVSAEKVQ |
| | | GRIKRVIEDVYAIYDAFARDEINTLKELDACLADKGIRRGHLPK |
| | | QMIGILSQERKDMEEKVRKKLQEMIADTDHRLDMLDRQTDRKI |
| | | RIGRKNAGLPKSGVIADWLVRDMMRFQPVAKDTSGKPLNNSK |
| | | ANSTEYRMLQRALALFGGEKERLTPYFRQMNLTGGNNPHPFLH |
| | | ETRWESHTNILSFYRSYLRARKAFLERIGRSDRVENCPFLLLKEP |
| | | KTDRQTLVAGWKGEFHLPRGIFTEAVRDCLIEMGYDEVGSYRE |
| | | VGFMAKAVPLYFERACEDRVQPFYDSPFNVGNSLKPKKGRFLS |
| | | KEDRAEEWERGKERFRDLEAWSHSAARRIKDAFAGIEYASPGN |
| | | KKKIEQLLRDLSLWEAFESKLKVRADKINLAKLKKEILEAQEHP |
| | | YHDFKSWQKFERELRLVKNQDIITWMMCRDLMEENKVEGLDT |
| | | GTLYLKDIRPNVQEQGSLNVLNRVKPMRLPVVVYRADSRGHV |
| | | HKEEAPLATVYIEERDTKLLKQGNFKSFVKDRRLNGLFSFVDTG |
| | | GLAMEQYPISKLRVEYELAKYQTARVCVFELTLRLEESLLSRYP |
| | | HLPDESFREMLESWSDPLLAKWPELHGKVRLLIAVRNAFSHNQ |
| | | YPMYDEAVFSSIRKYDPSSPDAIEERMGLNIAHRLSEEVKQAKE |
| | | TVERIIQA |
| Prevotella | 21 | MEDDKKTKESTNMLDNKHFWAAFLNLARHNVYITVNHINKVL |
| intermedia | | ELKNKKDQDIIIDNDQDILAIKTHWEKVNGDLNKTERLRELMTK |
| (SEQ ID | | HFPFLETAIYTKNKEDKEEVKQEKQAKAQSFDSLKHCLFLFLEK |
| No. 126) | | LQEARNYYSHYKYSESTKEPMLEKELLKKMYNIFDDNIQLVIK |
| | | DYQHNKDINPDEDFKHLDRTEEEFNYYFTTNKKGNITASGLLFF |
| | | VSLFLEKKDAIWMQQKLRGFKDNRESKKKMTHEVFCRSRMLL |
| | | PKLRLESTQTQDWILLDMLNELIRCPKSLYERLQGEYRKKFNVP |
| | | FDSADEDYDAEQEPFKNTLVRHQDRFPYFALRYFDYNEIFTNLR |
| | | FQIDLGTYHFSIYKKLIGGQKEDRHLTHKLYGFERIQEFAKQNR |
| | | TDEWKAIVKDFDTYETSEEPYISETAPHYHLENQKIGIRFRNDN |
| | | DEIWPSLKTNGENNEKRKYKLDKQYQAEAFLSVHELLPMMFY |
| | | YLLLKKEEPNNDKKNASIVEGFIKREIRDIYKLYDAFANGEINNI |
| | | DDLEKYCEDKGIPKRHLPKQMVAILYDEHKDMAEEAKRKQKE |
| | | MVKDTKKLLATLEKQTQGEIEDGGRNIRLLKSGEIARWLVNDM |
| | | MRFQPVQKDNEGNPLNNSKANSTEYQMLQRSLALYNKEEKPT |
| | | RYFRQVNLINSSNPHPFLKWTKWEECNNILSFYRSYLTKKIEFLN |
| | | KLKPEDWEKNQYFLKLKEPKTNRETLVQGWKNGFNLPRGIFTE |
| | | PIREWFKRHQNDSEEYEKVETLDRVGLVTKVIPLFFKKEDSKDK |
| | | EEYLKKDAQKEINNCVQPFYGFPYNVGNIHKPDEKDFLPSEERK |
| | | KLWGDKKYKFKGYKAKVKSKKLTDKEKEEYRSYLEFQSWNK |
| | | FERELRLVRNQDIVTWLLCTELIDKLKVEGLNVEELKKLRLKDI |
| | | DTDTAKQEKNNILNRVMPMQLPVTVYEIDDSHNIVKDRPLHTV |
| | | YIEETKTKLLKQGNFKALVKDRRLNGLFSFVDTSSETELKSNPIS |
| | | KSLVEYELGEYQNARIETIKDMLLLEETLIEKYKTLPTDNFSDM |
| | | LNGWLEGKDEADKARFQNDVKLLVAVRNAFSHNQYPMRNRIA |
| | | FANINPFSLSSADTSEEKKLDIANQLKDKTHKIIKRIIEIEKPIETK |
| | | E |
| PIN17_0200 | AFJ07523 | MKMEDDKKTKESTNMLDNKHFWAAFLNLARHNVYITVNHIN |
| [Prevotella | | KVLELKNKKDQDIIIDNDQDILAIKTHWEKVNGDLNKTERLREL |
| intermedia | | MTKHFPFLETAIYTKNKEDKEEVKQEKQAKAQSFDSLKHCLFL |
| 17] (SEQ | | FLEKLQEARNYYSHYKYSESTKEPMLEKELLKKMYNIFDDNIQ |
| ID No. | | LVIKDYQHNKDINPDEDFKHLDRTEEEFNYYFTTNKKGNITASG |
| 127) | | LLFFVSLFLEKKDAIWMQQKLRGFKDNRESKKKMTHEVFCRSR |
| | | MLLPKLRLESTQTQDWILLDMLNELIRCPKSLYERLQGEYRKKF |
| | | NVPFDSADEDYDAEQEPFKNTLVRHQDRFPYFALRYFDYNEIFT |
| | | NLRFQIDLGTYHFSIYKKLIGGQKEDRHLTHKLYGFERIQEFAK |
| | | QNRTDEWKAIVKDFDTYETSEEPYISETAPHYHLENQKIGIRFRN |
| | | DNDEIWPSLKTNGENNEKRKYKLDKQYQAEAFLSVHELLPMM |
| | | FYYLLLKKEEPNNDKKNASIVEGFIKREIRDIYKLYDAFANGEIN |
| | | NIDDLEKYCEDKGIPKRHLPKQMVAILYDEHKDMAEEAKRKQ |
| | | KEMVKDTKKLLATLEKQTQGEIEDGGRNIRLLKSGEIARWLVN |
| | | DMMRFQPVQKDNEGNPLNNSKANSTEYQMLQRSLALYNKEEK |
| | | PTRYFRQVNLINSSNPHPFLKWTKWEECNNILSFYRSYLTKKIEF |
| | | LNKLKPEDWEKNQYFLKLKEPKTNRETLVQGWKNGFNLPRGIF |
| | | TEPIREWFKRHQNDSEEYEKVETLDRVGLVTKVIPLFFKKEDSK |
| | | DKEEYLKKDAQKEINNCVQPFYGFPYNVGNIHKPDEKDFLPSEE |
| | | RKKLWGDKKYKFKGYKAKVKSKKLTDKEKEEYRSYLEFQSW |
| | | NKFERELRLVRNQDIVTWLLCTELIDKLKVEGLNVEELKKLRLK |
| | | DIDTDTAKQEKNNILNRVMPMQLPVTVYEIDDSHNIVKDRPLHT |
| | | VYIEETKTKLLKQGNFKALVKDRRLNGLFSFVDTSSETELKSNPI |
| | | SKSLVEYELGEYQNARIETIKDMLLLEETLIEKYKTLPTDNFSDM |
| | | LNGWLEGKDEADKARFQNDVKLLVAVRNAFSHNQYPMRNRIA |
| | | FANINPFSLSSADTSEEKKLDIANQLKDKTHKIIKRIIEIEKPIETK |
| | | E |
| Prevotella | BAU18623 | MEDDKKTTDSISYELKDKHFWAAFLNLARHNVYITVNHINKVL |
| intermedia | | ELKNKKDQDIIIDNDQDILAIKTHWEKVNGDLNKTERLRELMTK |
| (SEQ ID | | HFPFLETAIYSKNKEDKEEVKQEKQAKAQSFDSLKHCLFLFLEK |
| No. 128) | | LQETRNYYSHYKYSESTKEPMLEKELLKKMYNIFDDNIQLVIKD |
| | | YQHNKDINPDEDFKHLDRTEEDFNYYFTRNKKGNITESGLLFFV |
| | | SLFLEKKDAIWMQQKLRGFKDNRESKKKMTHEVFCRSRMLLP |
| | | KLRLESTQTQDWILLDMLNELIRCPKSLYERLQGEDREKFKVPF |
| | | DPADEDYDAEQEPFKNTLVRHQDRFPYFALRYFDYNEIFTNLRF |
| | | QIDLGTFHFSIYKKLIGGQKEDRHLTHKLYGFERIQEFAKQNRPD |
| | | EWKAIVKDLDTYETSNERYISETTPHYHLENQKIGIRFRNDNDEI |
| | | WPSLKTNGENNEKSKYKLDKQYQAEAFLSVHELLPMMFYYLL |
| | | LKKEEPNNDKKNASIVEGFIKREIRDMYKLYDAFANGEINNIDD |
| | | LEKYCEDKGIPKRHLPKQMVAILYDEHKDMVKEAKRKQRKMV |
| | | KDTEKLLAALEKQTQEKTEDGGRNIRLLKSGEIARWLVNDMM |
| | | RFQPVQKDNEGNPLNNSKANSTEYQMLQRSLALYNKEEKPTRY |
| | | FRQVNLINSSNPHPFLKWTKWEECNNILSFYRSYLTKKIEFLNKL |
| | | KPEDWEKNQYFLKLKEPKTNRETLVQGWKNGFNLPRGIFTEPIR |
| | | EWFKRHQNDSKEYEKVEALDRVGLVTKVIPLFFKKEDSKDKEE |
| | | DLKKDAQKEINNCVQPFYSFPYNVGNIHKPDEKDFLHREERIEL |
| | | WDKKKDKFKGYKAKVKSKKLTDKEKEEYRSYLEFQSWNKFER |
| | | ELRLVRNQDIVTWLLCTELIDKLKVEGLNVEELKKLRLKDIDTD |
| | | TAKQEKNNILNRVMPMQLPVTVYEIDDSHNIVKDRPLHTVYIEE |
| | | TKTKLLKQGNFKALVKDRRLNGLFSFVDTSSEAELKSNPISKSL |
| | | VEYELGEYQNARIETIKDMLLLEETLIEKYKNLPTDNFSDMLNG |
| | | WLEGKDEADKARFQNDVKLLVAVRNAFSHNQYPMRNRIAFAN |
| | | INPFSLSSADTSEEKKLDIANQLKDKTHKIIKRIIEIEKPIETKE |
| HMPREF6485_0083 | EFU31981 | MQKQDKLFVDRKKNAIFAFPKYITIMENKEKPEPIYYELTDKHF |
| [Prevotella | | WAAFLNLARHNVYTTINHINRRLEIAELKDDGYMMGIKGSWNE |
| buccae | | QAKKLDKKVRLRDLIMKHFPFLEAAAYEMTNSKSPNNKEQRE |
| ATCC | | KEQSEALSLNNLKNVLFIFLEKLQVLRNYYSHYKYSEESPKPIFE |
| 33574] | | TSLLKNMYKVFDANVRLVKRDYMHHENIDMQRDFTHLNRKK |
| (SEQ ID | | QVGRTKNIIDSPNFHYHFADKEGNMTIAGLLFFVSLFLDKKDAI |
| No. 129) | | WMQKKLKGFKDGRNLREQMTNEVFCRSRISLPKLKLENVQTK |
| | | DWMQLDMLNELVRCPKSLYERLREKDRESFKVPFDIFSDDYNA |
| | | EEEPFKNTLVRHQDRFPYFVLRYFDLNEIFEQLRFQIDLGTYHFS |
| | | IYNKRIGDEDEVRHLTHHLYGFARIQDFAPQNQPEEWRKLVKD |
| | | LDHFETSQEPYISKTAPHYHLENEKIGIKFCSAHNNLFPSLQTDK |
| | | TCNGRSKFNLGTQFTAEAFLSVHELLPMMFYYLLLTKDYSRKE |
| | | SADKVEGIIRKEISNIYAIYDAFANNEINSIADLTRRLQNTNILQG |
| | | HLPKQMISILKGRQKDMGKEAERKIGEMIDDTQRRLDLLCKQT |
| | | NQKIRIGKRNAGLLKSGKIADWLVNDMMRFQPVQKDQNNIPIN |
| | | NSKANSTEYRMLQRALALFGSENFRLKAYFNQMNLVGNDNPH |
| | | PFLAETQWEHQTNILSFYRNYLEARKKYLKGLKPQNWKQYQH |
| | | FLILKVQKTNRNTLVTGWKNSFNLPRGIFTQPIREWFEKHNNSK |
| | | RIYDQILSFDRVGFVAKAIPLYFAEEYKDNVQPFYDYPFNIGNRL |
| | | KPKKRQFLDKKERVELWQKNKELFKNYPSEKKKTDLAYLDFLS |
| | | WKKFERELRLIKNQDIVTWLMFKELFNMATVEGLKIGEIHLRDI |
| | | DTNTANEESNNILNRIMPMKLPVKTYETDNKGNILKERPLATFY |
| | | IEETETKVLKQGNFKALVKDRRLNGLFSFAETTDLNLEEHPISKL |
| | | SVDLELIKYQTTRISIFEMTLGLEKKLIDKYSTLPTDSFRNMLER |
| | | WLQCKANRPELKNYVNSLIAVRNAFSHNQYPMYDATLFAEVK |
| | | KFTLFPSVDTKKIELNIAPQLLEIVGKAIKEIEKSENKN |
| HMPREF9144_1146 | EGQ18444 | MKEEEKGKTPVVSTYNKDDKHFWAAFLNLARHNVYITVNHIN |
| [Prevotella | | KILGEGEINRDGYENTLEKSWNEIKDINKKDRLSKLIIKHFPFLE |
| pallens | | VTTYQRNSADTTKQKEEKQAEAQSLESLKKSFFVFIYKLRDLRN |
| ATCC | | HYSHYKHSKSLERPKFEEDLQEKMYNIFDASIQLVKEDYKHNT |
| 700821] | | DIKTEEDFKHLDRKGQFKYSFADNEGNITESGLLFFVSLFLEKK |
| (SEQ ID | | DAIWVQKKLEGFKCSNESYQKMTNEVFCRSRMLLPKLRLQSTQ |
| No. 130) | | TQDWILLDMLNELIRCPKSLYERLREEDRKKFRVPIEIADEDYD |
| | | AEQEPFKNALVRHQDRFPYFALRYFDYNEIFTNLRFQIDLGTYH |
| | | FSIYKKQIGDYKESHHLTHKLYGFERIQEFTKQNRPDEWRKFVK |
| | | TFNSFETSKEPYIPETTPHYHLENQKIGIRFRNDNDKIWPSLKTNS |
| | | EKNEKSKYKLDKSFQAEAFLSVHELLPMMFYYLLLKTENTDND |
| | | NEIETKKKENKNDKQEKHKIEEIIENKITEIYALYDAFANGKINSI |
| | | DKLEEYCKGKDIEIGHLPKQMIAILKSEHKDMATEAKRKQEEM |
| | | LADVQKSLESLDNQINEEIENVERKNSSLKSGEIASWLVNDMM |
| | | RFQPVQKDNEGNPLNNSKANSTEYQMLQRSLALYNKEEKPTRY |
| | | FRQVNLIESSNPHPFLNNTEWEKCNNILSFYRSYLEAKKNFLESL |
| | | KPEDWEKNQYFLMLKEPKTNCETLVQGWKNGFNLPRGIFTEPI |
| | | RKWFMEHRKNITVAELKRVGLVAKVIPLFFSEEYKDSVQPFYN |
| | | YLFNVGNINKPDEKNFLNCEERRELLRKKKDEFKKMTDKEKEE |
| | | NPSYLEFQSWNKFERELRLVRNQDIVTWLLCMELFNKKKIKEL |
| | | NVEKIYLKNINTNTTKKEKNTEEKNGEEKIIKEKNNILNRIMPMR |
| | | LPIKVYGRENFSKNKKKKIRRNTFFTVYIEEKGTKLLKQGNFKA |
| | | LERDRRLGGLFSFVKTHSKAESKSNTISKSRVEYELGEYQKARIE |
| | | IIKDMLALEETLIDKYNSLDTDNFHNMLTGWLKLKDEPDKASF |
| | | QNDVDLLIAVRNAFSHNQYPMRNRIAFANINPFSLSSANTSEEK |
| | | GLGIANQLKDKTHKTIEKIIEIEKPIETKE |
| HMPREF9714_02132 | EHO08761 | MKDILTTDTTEKQNRFYSHKIADKYFFGGYFNLASNNIYEVFEE |
| [Myroides | | VNKRNTFGKLAKRDNGNLKNYIIHVFKDELSISDFEKRVAIFAS |
| odoratimimus | | YFPILETVDKKSIKERNRTIDLTLSQRIRQFREMLISLVTAVDQLR |
| CCUG | | NFYTHYHHSEIVIENKVLDFLNSSLVSTALHVKDKYLKTDKTKE |
| 12901] | | FLKETIAAELDILIEAYKKKQIEKKNTRFKANKREDILNAIYNEA |
| (SEQ ID | | FWSFINDKDKDKETVVAKGADAYFEKNHHKSNDPDFALNISEK |
| No. 131) | | GIVYLLSFFLTNKEMDSLKANLTGFKGKVDRESGNSIKYMATQ |
| | | RIYSFHTYRGLKQKIRTSEEGVKETLLMQMIDELSKVPNVVYQH |
| | | LSTTQQNSFIEDWNEYYKDYEDDVETDDLSRVIHPVIRKRYEDR |
| | | FNYFAIRFLDEFFDFPTLRFQVHLGDYVHDRRTKQLGKVESDRII |
| | | KEKVTVFARLKDINSAKANYFHSLEEQDKEELDNKWTLFPNPS |
| | | YDFPKEHTLQHQGEQKNAGKIGIYVKLRDTQYKEKAALEEARK |
| | | SLNPKERSATKASKYDIITQIIEANDNVKSEKPLVFTGQPIAYLS |
| | | MNDIHSMLFSLLTDNAELKKTPEEVEAKLIDQIGKQINEILSKDT |
| | | DTKILKKYKDNDLKETDTDKITRDLARDKEEIEKLILEQKQRAD |
| | | DYNYTSSTKFNIDKSRKRKHLLFNAEKGKIGVWLANDIKRFMT |
| | | EEFKSKWKGYQHTELQKLFAYYDTSKSDLDLILSDMVMVKDY |
| | | PIELIALVKKSRTLVDFLNKYLEARLGYMENVITRVKNSIGTPQF |
| | | KTVRKECFTFLKKSNYTVVSLDKQVERILSMPLFIERGFMDDKP |
| | | TMLEGKSYQQHKEKFADWFVHYKENSNYQNFYDTEVYEITTE |
| | | DKREKAKVTKKIKQQQKNDVFTLMMVNYMLEEVLKLSSNDRL |
| | | SLNELYQTKEERIVNKQVAKDTQERNKNYIWNKVVDLQLCEG |
| | | LVRIDKVKLKDIGNFRKYENDSRVKEFLTYQSDIVWSAYLSNEV |
| | | DSNKLYVIERQLDNYESIRSKELLKEVQEIECSVYNQVANKESL |
| | | KQSGNENFKQYVLQGLVPIGMDVREMLILSTDVKFIKEEIIQLG |
| | | QAGEVEQDLYSLIYIRNKFAHNQLPIKEFFDFCENNYRSISDNEY |
| | | YAEYYMEIFRSIKEKYTS |
| HMPREF9711_00870 | EKB06014 | MKDILTTDTTEKQNRFYSHKIADKYFFGGYFNLASNNIYEVFEE |
| [Myroides | | VNKRNTFGKLAKRDNGNLKNYIIHVFKDELSISDFEKRVAIFAS |
| odoratimimus | | YFPILETVDKKSIKERNRTIDLTLSQRIRQFREMLISLVTAVDQLR |
| CCUG | | NFYTHYHHSEIVIENKVLDFLNSSLVSTALHVKDKYLKTDKTKE |
| 3837] | | FLKETIAAELDILIEAYKKKQIEKKNTRFKANKREDILNAIYNEA |
| (SEQ ID | | FWSFINDKDKDKETVVAKGADAYFEKNHHKSNDPDFALNISEK |
| No. 132) | | GIVYLLSFFLTNKEMDSLKANLTGFKGKVDRESGNSIKYMATQ |
| | | RIYSFHTYRGLKQKIRTSEEGVKETLLMQMIDELSKVPNVVYQH |
| | | LSTTQQNSFIEDWNEYYKDYEDDVETDDLSRVIHPVIRKRYEDR |
| | | FNYFAIRFLDEFFDFPTLRFQVHLGDYVHDRRTKQLGKVESDRII |
| | | KEKVTVFARLKDINSAKASYFHSLEEQDKEELDNKWTLFPNPS |
| | | YDFPKEHTLQHQGEQKNAGKIGIYVKLRDTQYKEKAALEEARK |
| | | SLNPKERSATKASKYDIITQIIEANDNVKSEKPLVFTGQPIAYLS |
| | | MNDIHSMLFSLLTDNAELKKTPEEVEAKLIDQIGKQINEILSKDT |
| | | DTKILKKYKDNDLKETDTDKITRDLARDKEEIEKLILEQKQRAD |
| | | DYNYTSSTKFNIDKSRKRKHLLFNAEKGKIGVWLANDIKRFMF |
| | | KESKSKWKGYQHTELQKLFAYFDTSKSDLELILSDMVMVKDYP |
| | | IELIDLVRKSRTLVDFLNKYLEARLGYIENVITRVKNSIGTPQFKT |
| | | VRKECFAFLKESNYTVASLDKQIERILSMPLFIERGFMDSKPTML |
| | | EGKSYQQHKEDFADWFVHYKENSNYQNFYDTEVYEIITEDKRE |
| | | QAKVTKKIKQQQKNDVFTLMMVNYMLEEVLKLPSNDRLSLNE |
| | | LYQTKEERIVNKQVAKDTQERNKNYIWNKVVDLQLCEGLVRID |
| | | KVKLKDIGNFRKYENDSRVKEFLTYQSDIVWSGYLSNEVDSNK |
| | | LYVIERQLDNYESIRSKELLKEVQEIECIVYNQVANKESLKQSGN |
| | | ENFKQYVLQGLLPRGTDVREMLILSTDVKFKKEEIMQLGQVRE |
| | | VEQDLYSLIYIRNKFAHNQLPIKEFFDFCENNYRPISDNEYYAEY |
| | | YMEIFRSIKEKYAS |
| HMPREF9699_02005 | EKB54193 | MENKTSLGNNIYYNPFKPQDKSYFAGYFNAAMENTDSVFRELG |
| [Bergeyella | | KRLKGKEYTSENFFDAIFKENISLVEYERYVKLLSDYFPMARLL |
| zoohelcum | | DKKEVPIKERKENFKKNFKGIIKAVRDLRNFYTHKEHGEVEITD |
| ATCC | | EIFGVLDEMLKSTVLTVKKKKVKTDKTKEILKKSIEKQLDILCQ |
| 43767] | | KKLEYLRDTARKIEEKRRNQRERGEKELVAPFKYSDKRDDLIA |
| (SEQ ID | | AIYNDAFDVYIDKKKDSLKESSKAKYNTKSDPQQEEGDLKIPIS |
| No. 133) | | KNGVVFLLSLFLTKQEIHAFKSKIAGFKATVIDEATVSEATVSHG |
| | | KNSICFMATHEIFSHLAYKKLKRKVRTAEINYGEAENAEQLSVY |
| | | AKETLMMQMLDELSKVPDVVYQNLSEDVQKTFIEDWNEYLKE |
| | | NNGDVGTMEEEQVIHPVIRKRYEDKFNYFAIRFLDEFAQFPTLR |
| | | FQVHLGNYLHDSRPKENLISDRRIKEKITVFGRLSELEHKKALFI |
| | | KNTETNEDREHYWEIFPNPNYDFPKENISVNDKDFPIAGSILDRE |
| | | KQPVAGKIGIKVKLLNQQYVSEVDKAVKAHQLKQRKASKPSIQ |
| | | NIIEEIVPINESNPKEAIVFGGQPTAYLSMNDIHSILYEFFDKWEK |
| | | KKEKLEKKGEKELRKEIGKELEKKIVGKIQAQIQQIIDKDTNAKI |
| | | LKPYQDGNSTAIDKEKLIKDLKQEQNILQKLKDEQTVREKEYN |
| | | DFIAYQDKNREINKVRDRNHKQYLKDNLKRKYPEAPARKEVL |
| | | YYREKGKVAVWLANDIKRFMPTDFKNEWKGEQHSLLQKSLAY |
| | | YEQCKEELKNLLPEKVFQHLPFKLGGYFQQKYLYQFYTCYLDK |
| | | RLEYISGLVQQAENFKSENKVFKKVENECFKFLKKQNYTHKEL |
| | | DARVQSILGYPIFLERGFMDEKPTIIKGKTFKGNEALFADWFRY |
| | | YKEYQNFQTFYDTENYPLVELEKKQADRKRKTKIYQQKKNDV |
| | | FTLLMAKHIFKSVFKQDSIDQFSLEDLYQSREERLGNQERARQT |
| | | GERNTNYIWNKTVDLKLCDGKITVENVKLKNVGDFIKYEYDQR |
| | | VQAFLKYEENIEWQAFLIKESKEEENYPYVVEREIEQYEKVRRE |
| | | ELLKEVHLIEEYILEKVKDKEILKKGDNQNFKYYILNGLLKQLK |
| | | NEDVESYKVFNLNTEPEDVNINQLKQEATDLEQKAFVLTYIRN |
| | | KFAHNQLPKKEFWDYCQEKYGKIEKEKTYAEYFAEVFKKEKE |
| | | ALIK |
| HMPREF9151_01387 | EKY00089 | MMEKENVQGSHIYYEPTDKCFWAAFYNLARHNAYLTIAHINSF |
| [Prevotella | | VNSKKGINNDDKVLDIIDDWSKFDNDLLMGARLNKLILKHFPFL |
| saccharolytica | | KAPLYQLAKRKTRKQQGKEQQDYEKKGDEDPEVIQEAIANAFK |
| F0055] | | MANVRKTLHAFLKQLEDLRNHFSHYNYNSPAKKMEVKFDDGF |
| (SEQ ID | | CNKLYYVFDAALQMVKDDNRMNPEINMQTDFEHLVRLGRNR |
| No. 134) | | KIPNTFKYNFTNSDGTINNNGLLFFVSLFLEKRDAIWMQKKIKG |
| | | FKGGTENYMRMTNEVFCRNRMVIPKLRLETDYDNHQLMFDML |
| | | NELVRCPLSLYKRLKQEDQDKFRVPIEFLDEDNEADNPYQENA |
| | | NSDENPTEETDPLKNTLVRHQHRFPYFVLRYFDLNEVFKQLRFQ |
| | | INLGCYHFSIYDKTIGERTEKRHLTRTLFGFDRLQNFSVKLQPEH |
| | | WKNMVKHLDTEESSDKPYLSDAMPHYQIENEKIGIHFLKTDTE |
| | | KKETVWPSLEVEEVSSNRNKYKSEKNLTADAFLSTHELLPMMF |
| | | YYQLLSSEEKTRAAAGDKVQGVLQSYRKKIFDIYDDFANGTINS |
| | | MQKLDERLAKDNLLRGNMPQQMLAILEHQEPDMEQKAKEKL |
| | | DRLITETKKRIGKLEDQFKQKVRIGKRRADLPKVGSIADWLVND |
| | | MMRFQPAKRNADNTGVPDSKANSTEYRLLQEALAFYSAYKDR |
| | | LEPYFRQVNLIGGTNPHPFLHRVDWKKCNHLLSFYHDYLEAKE |
| | | QYLSHLSPADWQKHQHFLLLKVRKDIQNEKKDWKKSLVAGW |
| | | KNGFNLPRGLFTESIKTWFSTDADKVQITDTKLFENRVGLIAKLI |
| | | PLYYDKVYNDKPQPFYQYPFNINDRYKPEDTRKRFTAASSKLW |
| | | NEKKMLYKNAQPDSSDKIEYPQYLDFLSWKKLERELRMLRNQ |
| | | DMMVWLMCKDLFAQCTVEGVEFADLKLSQLEVDVNVQDNLN |
| | | VLNNVSSMILPLSVYPSDAQGNVLRNSKPLHTVYVQENNTKLL |
| | | KQGNFKSLLKDRRLNGLFSFIAAEGEDLQQHPLTKNRLEYELSI |
| | | YQTMRISVFEQTLQLEKAILTRNKTLCGNNFNNLLNSWSEHRTD |
| | | KKTLQPDIDFLIAVRNAFSHNQYPMSTNTVMQGIEKFNIQTPKL |
| | | EEKDGLGIASQLAKKTKDAASRLQNIINGGTN |
| A3431752 | EOA10535 | MTEQNEKPYNGTYYTLEDKHFWAAFFNLARHNAYITLTHIDRQ |
| [Porphyromonas | | LAYSKADITNDEDILFFKGQWKNLDNDLERKARLRSLILKHFSF |
| gingivalis | | LEGAAYGKKLFESQSSGNKSSKKKELTKKEKEELQANALSLDN |
| JCVI | | LKSILFDFLQKLKDFRNYYSHYRHPESSELPLFDGNMLQRLYNV |
| SC001] | | FDVSVQRVKRDHEHNDKVDPHRHFNHLVRKGKKDRCGNNDN |
| (SEQ ID | | PFFKHHFVDREEKVTEAGLLFFVSLFLEKRDAIWMQKKIRGFKG |
| No. 135) | | GTETYQQMTNEVFCRSRISLPKLKLESLRTDDWMLLDMLNELV |
| | | RCPKSLYDRLREEDRARFRVPVDILSDEDDTDGTEEDPFKNTLV |
| | | RHQDRFPYFALRYFDLKKVFTSLRFHIDLGTYHFAIYKKNIGEQ |
| | | PEDRHLTRNLYGFGRIQDFAEEHRPEEWKRLVRDLDYFETGDK |
| | | PYITQTTPHYHIEKGKIGLRFVPEGQLLWPSPEVGATRTGRSKY |
| | | AQDKRFTAEAFLSVHELMPMMFYYFLLREKYSEEASAERVQGR |
| | | IKRVIEDVYAVYDAFARGEIDTLDRLDACLADKGIRRGHLPRQ |
| | | MIAILSQEHKDMEEKVRKKLQEMIADTDHRLDMLDRQTDRKIR |
| | | IGRKNAGLPKSGVIADWLVRDMMRFQPVAKDTSGKPLNNSKA |
| | | NSTEYRMLQRALALFGGEKERLTPYFRQMNLTGGNNPETPFLHE |
| | | TRWESHTNILSFYRSYLKARKAFLQSIGRSDRVENHRFLLLKEP |
| | | KTDRQTLVAGWKGEFHLPRGIFTEAVRDCLIEMGLDEVGSYKE |
| | | VGFMAKAVPLYFERACKDRVQPFYDYPFNVGNSLKPKKGRFLS |
| | | KEKRAEEWESGKERFRDLEAWSHSAARRIEDAFAGIENASREN |
| | | KKKIEQLLQDLSLWETFESKLKVKADKINIAKLKKEILEAKEHP |
| | | YLDFKSWQKFERELRLVKNQDIITWMMCRDLMEENKVEGLDT |
| | | GTLYLKDIRTDVHEQGSLNVLNRVKPMRLPVVVYRADSRGHV |
| | | HKEQAPLATVYIEERDTKLLICQGNFKSFVKDRRLNGLFSFVDT |
| | | GALAMEQYPISKLRVEYELAKYQTARVCAFEQTLELEESLLTRY |
| | | PHLPDKNFRKMLESWSDPLLDKWPDLHGNVRLLIAVRNAFSHN |
| | | QYPMYDETLFSSIRKYDPSSPDAIEERMGLNIAHRLSEEVKQAK |
| | | EMVERIIQA |
| HMPREF1981_03090 | ERI81700 | MESIKNSQKSTGKTLQKDPPYFGLYLNMALLNVRKVENHIRKW |
| [Bacteroides | | LGDVALLPEKSGFHSLLTTDNLSSAKWTRFYYKSRKFLPFLEMF |
| pyogenes | | DSDKKSYENRRETTECLDTIDRQKISSLLKEVYGKLQDIRNAFS |
| F0041] | | HYHIDDQSVKHTALIISSEMHRFIENAYSFALQKTRARFTGVFVE |
| (SEQ ID | | TDFLQAEEKGDNKKFFAIGGNEGIKLKDNALIFLICLFLDREEAF |
| No. 136) | | KFLSRATGFKSTKEKGFLAVRETFCALCCRQPHERLLSVNPREA |
| | | LLMDMLNELNRCPDILFEMLDEKDQKSFLPLLGEEEQAHILENS |
| | | LNDELCEAIDDPFEMIASLSKRVRYKNRFPYLMLRYIEEKNLLPF |
| | | IRFRIDLGCLELASYPKKMGEENNYERSVTDHAMAFGRLTDFH |
| | | NEDAVLQQITKGITDEVRFSLYAPRYAIYNNKIGFVRTGGSDKIS |
| | | FPTLKKKGGEGHCVAYTLQNTKSFGFISIYDLRKILLLSFLDKDK |
| | | AKNIVSGLLEQCEKHWKDLSENLFDAIRTELQKEFPVPLIRYTLP |
| | | RSKGGKLVSSKLADKQEKYESEFERRKEKLTEILSEKDFDLSQIP |
| | | RRMIDEWLNVLPTSREKKLKGYVETLKLDCRERLRVFEKREKG |
| | | EHPVPPRIGEMATDLAKDIIRMVIDQGVKQRITSAYYSEIQRCLA |
| | | QYAGDDNRRHLDSIIRELRLKDTKNGHPFLGKVLRPGLGHTEK |
| | | LYQRYFEEKKEWLEATFYPAASPKRVPRFVNPPTGKQKELPLII |
| | | RNLMKERPEWRDWKQRKNSHPIDLPSQLFENEICRLLKDKIGKE |
| | | PSGKLKWNEMFKLYWDKEFPNGMQRFYRCKRRVEVFDKVVE |
| | | YEYSEEGGNYKKYYEALIDEVVRQKISSSKEKSKLQVEDLTLSV |
| | | RRVFKRAINEKEYQLRLLCEDDRLLFMAVRDLYDWKEAQLDL |
| | | DKIDNMLGEPVSVSQVIQLEGGQPDAVIKAECKLKDVSKLMRY |
| | | CYDGRVKGLMPYFANHEATQEQVEMELRHYEDHRRRVFNWV |
| | | FALEKSVLKNEKLRRFYEESQGGCEHRRCIDALRKASLVSEEEY |
| | | EFLVHIRNKSAHNQFPDLEIGKLPPNVTSGFCECIWSKYKAIICRI |
| | | IPFIDPERRFFGKLLEQK |
| HMPREF1553_02065 | ERJ65637 | MNTVPASENKGQSRTVEDDPQYFGLYLNLARENLIEVESHVRIK |
| [Porphyromonas | | FGKKKLNEESLKQSLLCDHLLSVDRWTKVYGHSRRYLPFLHYF |
| gingivalis | | DPDSQIEKDHDSKTGVDPDSAQRLIRELYSLLDFLRNDFSHNRL |
| F0568] | | DGTTFEHLEVSPDISSFITGTYSLACGRAQSRFADFFKPDDFVLA |
| (SEQ ID | | KNRKEQLISVADGKECLTVSGLAFFICLFLDREQASGMLSRIRGF |
| No. 137) | | KRTDENWARAVHETFCDLCIRHPHDRLESSNTKEALLLDMLNE |
| | | LNRCPRILYDMLPEEERAQFLPALDENSMNNLSENSLNEESRLL |
| | | WDGSSDWAEALTKRIRHQDRFPYLMLRFIEEMDLLKGIRFRVD |
| | | LGEIELDSYSKKVGRNGEYDRTITDHALAFGKLSDFQNEEEVSR |
| | | MISGEASYPVRFSLFAPRYAIYDNKIGYCHTSDPVYPKSKTGEK |
| | | RALSNPRSMGFISVHDLRKLLLMELLCEGSFSRMQSDFLRKANR |
| | | ILDETAEGKLQFSALFPEMRHRFIPPQNPKSKDRREKAETTLEKY |
| | | KQEIKGRKDKLNSQLLSAFDMDQRQLPSRLLDEWMNIRPASHS |
| | | VKLRTYVKQLNEDCRLRLQKFRKDGDGKARAIPLVGEMATFLS |
| | | QDIVRMIISEETKKLITSAYYNEMQRSLAQYAGEENRHQFRAIV |
| | | AELRLLDPSSGHPFLSATMETAHRYTEDFYKCYLEKKREWLAK |
| | | TFYRPEQDENTKRRISVFFVPDGEARKLLPLLIRRRMKEQNDLQ |
| | | DWIRNKQAHPIDLPSHLFDSKIMELLKVKDGKKKWNEAFKDW |
| | | WSTKYPDGMQPFYGLRRELNIHGKSVSYIPSDGKKFADCYTHL |
| | | MEKTVQDKKRELRTAGKPVPPDLAADIKRSFHRAVNEREFMLR |
| | | LVQEDDRLMLMAINKMMTDREEDILPGLKNIDSILDEENQFSLA |
| | | VHAKVLEKEGEGGDNSLSLVPATIEIKSKRKDWSKYIRYRYDR |
| | | RVPGLMSHFPEHKATLDEVKTLLGEYDRCRIKIFDWAFALEGAI |
| | | MSDRDLKPYLHESSSREGKSGEHSTLVKMLVEKKGCLTPDESQ |
| | | YLILIRNKAAHNQFPCAAEMPLIYRDVSAKVGSIEGSSAKDLPE |
| | | GSSLVDSLWKKYEMIIRKILPILDPENRFFGKLLNNMSQPINDL |
| HMPREF1988_01768 | ERJ81987 | MNTVPASENKGQSRTVEDDPQYFGLYLNLARENLIEVESHVRIK |
| [Porphyromonas | | FGKKKLNEESLKQSLLCDHLLSVDRWTKVYGHSRRYLPFLHYF |
| gingivalis | | DPDSQIEKDHDSKTGVDPDSAQRLIRELYSLLDFLRNDFSHNRL |
| F0185] | | DGTTFEHLEVSPDISSFITGTYSLACGRAQSRFADFFKPDDFVLA |
| (SEQ ID | | KNRKEQLISVADGKECLTVSGLAFFICLFLDREQASGMLSRIRGF |
| No. 138) | | KRTDENWARAVHETFCDLCIRHPHDRLESSNTKEALLLDMLNE |
| | | LNRCPRILYDMLPEEERAQFLPALDENSMNNLSENSLNEESRLL |
| | | WDGSSDWAEALTKRIRHQDRFPYLMLRFIEEMDLLKGIRFRVD |
| | | LGEIELDSYSKKVGRNGEYDRTITDHALAFGKLSDFQNEEEVSR |
| | | MISGEASYPVRFSLFAPRYAIYDNKIGYCHTSDPVYPKSKTGEK |
| | | RALSNPQSMGFISVHDLRKLLLMELLCEGSFSRMQSGFLRKANR |
| | | ILDETAEGKLQFSALFPEMRHRFIPPQNPKSKDRREKAETTLEKY |
| | | KQEIKGRKDKLNSQLLSAFDMNQRQLPSRLLDEWMNIRPASHS |
| | | VKLRTYVKQLNEDCRLRLRKFRKDGDGKARAIPLVGEMATFLS |
| | | QDIVRMIISEETKKLITSAYYNEMQRSLAQYAGEENRRQFRAIV |
| | | AELHLLDPSSGHPFLSATMETAHRYTEDFYKCYLEKKREWLAK |
| | | TFYRPEQDENTKRRISVFFVPDGEARKLLPLLIRRRMKEQNDLQ |
| | | DWIRNKQAHPIDLPSHLFDSKIMELLKVKDGKKKWNEAFKDW |
| | | WSTKYPDGMQPFYGLRRELNIHGKSVSYIPSDGKKFADCYTHL |
| | | MEKTVQDKKRELRTAGKPVPPDLAADIKRSFHRAVNEREFMLR |
| | | LVQEDDRLMLMAINKMMTDREEDILPGLKNIDSILDEENQFSLA |
| | | VHAKVLEKEGEGGDNSLSLVPATIEIKSKRKDWSKYIRYRYDR |
| | | RVPGLMSHFPEHKATLDEVKTLLGEYDRCRIKIFDWAFALEGAI |
| | | MSDRDLKPYLHESSSREGKSGEHSTLVKMLVEKKGCLTPDESQ |
| | | YLILIRNKAAHNQFPCAAEMPLIYRDVSAKVGSIEGSSAKDLPE |
| | | GSSLVDSLWKKYEMIIRKILPILDHENRFFGKLLNNMSQPINDL |
| HMPREF1990_01800 | ERJ87335 | MNTVPASENKGQSRTVEDDPQYFGLYLNLARENLIEVESHVRIK |
| [Porphyromonas | | FGKKKLNEESLKQSLLCDHLLSVDRWTKVYGHSRRYLPFLHYF |
| gingivalis | | DPDSQIEKDHDSKTGVDPDSAQRLIRELYSLLDFLRNDFSHNRL |
| W4087] | | DGTTFEHLEVSPDISSFITGTYSLACGRAQSRFADFFKPDDFVLA |
| (SEQ ID | | KNRKEQLISVADGKECLTVSGLAFFICLFLDREQASGMLSRIRGF |
| No. 139) | | KRTDENWARAVHETFCDLCIRHPHDRLESSNTKEALLLDMLNE |
| | | LNRCPRILYDMLPEEERAQFLPALDENSMNNLSENSLNEESRLL |
| | | WDGSSDWAEALTKRIRHQDRFPYLMLRFIEEMDLLKGIRFRVD |
| | | LGEIELDSYSKKVGRNGEYDRTITDHALAFGKLSDFQNEEEVSR |
| | | MISGEASYPVRFSLFAPRYAIYDNKIGYCHTSDPVYPKSKTGEK |
| | | RALSNPRSMGFISVHDLRKLLLMELLCEGSFSRMQSDFLRKANR |
| | | ILDETAEGKLQFSALFPEMRHRFIPPQNPKSKDRREKAETTLEKY |
| | | KQEIKGRKDKLNSQLLSAFDMDQRQLPSRLLDEWMNIRPASHS |
| | | VKLRTYVKQLNEDCRLRLQKFRKDGDGKARAIPLVGEMATFLS |
| | | QDIVRMIISEETKKLITSAYYNEMQRSLAQYAGEENRHQFRAIV |
| | | AELRLLDPSSGHPFLSATMETAHRYTEDFYKCYLEKKREWLAK |
| | | TFYRPEQDENTKRRISVFFVPDGEARKLLPLLIRRRMKEQNDLQ |
| | | DWIRNKQAHPIDLPSHLFDSKVMELLKVKDGKKKWNEAFKDW |
| | | WSTKYPDGMQPFYGLRRELNIHGKSVSYIPSDGKKFADCYTHL |
| | | MEKTVRDKKRELRTAGKPVPPDLAAYIKRSFHRAVNEREFMLR |
| | | LVQEDDRLMLMAINKIMTDREEDILPGLKNIDSILDKENQFSLA |
| | | VHAKVLEKEGEGGDNSLSLVPATIEIKSKRKDWSKYIRYRYDR |
| | | RVPGLMSHFPEHKATLDEVKTLLGEYDRCRIKIFDWAFALEGAI |
| | | MSDRDLKPYLHESSSREGKSGEHSTLVKMLVEKKGCLTPDESQ |
| | | YLILIRNKAAHNQFPCAAEIPLIYRDVSAKVGSIEGSSAKDLPEG |
| | | SSLVDSLWKKYEMIIRKILPILDPENRFFGKLLNNMSQPINDL |
| M573_117042 | KJJ86756 | MKMEDDKKTTESTNMLDNKHFWAAFLNLARHNVYITVNHINK |
| [Prevotella | | VLELKNKKDQDIIIDNDQDILAIKTHWEKVNGDLNKTERLRELM |
| intermedia | | TKHFPFLETAIYTKNKEDKEEVKQEKQAEAQSLESLKDCLFLFL |
| ZT] (SEQ | | EKLQEARNYYSHYKYSESTKEPMLEEGLLEKMYNIFDDNIQLVI |
| ID No. | | KDYQHNKDINPDEDFKHLDRKGQFKYSFADNEGNITESGLLFF |
| 140) | | VSLFLEKKDAIWMQQKLTGFKDNRESKKKMTHEVFCRRRMLL |
| | | PKLRLESTQTQDWILLDMLNELIRCPKSLYERLQGEYRKKFNVP |
| | | FDSADEDYDAEQEPFKNTLVRHQDREPYFALRYFDYNEIFTNLR |
| | | FQIDLGTYHFSIYKKLIGGQKEDRHLTHKLYGFERIQEFAKQNRP |
| | | DEWKALVKDLDTYETSNERYISETTPHYHLENQKIGIRFRNGNK |
| | | EIWPSLKTNGENNEKSKYKLDKPYQAEAFLSVHELLPMMFYYL |
| | | LLKKEEPNNDKKNASIVEGFIKREIRDMYKLYDAFANGEINNIG |
| | | DLEKYCEDKGIPKRHLPKQMVAILYDEPKDMVKEAKRKQKEM |
| | | VKDTKKLLATLEKQTQEEIEDGGRNIRLLKSGEIARWLVNDMM |
| | | RFQPVQKDNEGNPLNNSKANSTEYQMLQRSLALYNKEEKPTRY |
| | | FRQVNLINSSNPHPFLKWTKWEECNNILSFYRNYLTKKIEFLNK |
| | | LKPEDWEKNQYFLKLKEPKTNRETLVQGWKNGFNLPRGIFTEPI |
| | | REWFKRHQNDSKEYEKVEALKRVGLVTKVIPLEFKEEYEKEDA |
| | | QKEINNCVQPFYSFPYNVGNIHKPDEKDFLPSEERKKLWGDKK |
| | | DKFKGYKAKVKSKKLTDKEKEEYRSYLEFQSWNKFERELRLV |
| | | RNQDIVTWLLCTELIDKMKVEGLNVEELQKLRLKDIDTDTAKQ |
| | | EKNNILNRIMPMQLPVTVYEIDDSHNIVKDRPLHTVYIEETKTKL |
| | | LKQGNFKALVKDRRLNGLFSFVDTSSKAELKDKPISKSVVEYEL |
| | | GEYQNARIETIKDMLLLEKTLIKKYEKLPTDNFSDMLNGWLEG |
| | | KDESDKARFQNDVKLLVAVRNAFSHNQYPMRNRIAFANINPFS |
| | | LSSADISEEKKLDIANQLKDKTHKIIKKIIEIEKPIETKE |
| A2033_10205 | OFX18020.1 | MENQTQKGKGIYYYYTKNEDKHYFGSFLNLANNNIEQIIEEFRI |
| [Bacteroidetes | | RLSLKDEKNIKEIINNYFTDKKSYTDWERGINILKEYLPVIDYLD |
| bacterium | | LAITDKEFEKIDLKQKETAKRKYFRTNFSLLIDTIIDLRNFYTHYF |
| GWA2_31_9] | | HKPISINPDVAKFLDKNLLNVCLDIKKQKMKTDKTKQALKDGL |
| (SEQ | | DKELKKLIELKKAELKEKKIKTWNITENVEGAVYNDAFNHMVY |
| ID No. | | KNNAGVTILKDYHKSILPDDKIDSELKLNFSISGLVFLLSMFLSK |
| 141) | | KEIEQFKSNLEGFKGKVIGENGEYEISKFNNSLKYMATHWIFSY |
| | | LTFKGLKQRVKNTEDKETLLMQMIDELNKVPHEVYQTLSKEQQ |
| | | NEFLEDINEYVQDNEENKKSMENSIVVHPVIRKRYDDKENYFAI |
| | | RELDEFANEPTLKFFVTAGNEVHDKREKQIQGSMLTSDRMIKEK |
| | | INVFGKLTEIAKYKSDYFSNENTLETSEWELFPNPSYLLIQNNIPV |
| | | HIDLIHNTEEAKQCQIAIDRIKCTTNPAKKRNTRKSKEEIIKIIYQ |
| | | KNKNIKYGDPTALLSSNELPALIYELLVNKKSGKELENIIVEKIV |
| | | NQYKTIAGFEKGQNLSNSLITKKLKKSEPNEDKINAEKIILAINRE |
| | | LEITENKLNIIKNNRAEFRTGAKRKHIFYSKELGQEATWIAYDLK |
| | | RFMPEASRKEWKGEHHSELQKFLAFYDRNKNDAKALLNMFW |
| | | NFDNDQLIGNDLNSAFREFHFDKEYEKYLIKRDEILEGFKSFISN |
| | | FKDEPKLLKKGIKDIYRVEDKRYYIIKSTNAQKEQLLSKPICLPR |
| | | GIFDNKPTYIEGVKVESNSALFADWYQYTYSDKHEFQSFYDMP |
| | | RDYKEQFEKFELNNIKSIQNKKNLNKSDKFIYFRYKQDLKIKQIK |
| | | SQDLFIKLMVDELENVVEKNNIELNLKKLYQTSDERFKNQLIAD |
| | | VQKNREKGDTSDNKMNENFIWNMTIPLSLCNGQIEEPKVKLKD |
| | | IGKFRKLETDDKVIQLLEYDKSKVWKKLEIEDELENMPNSYERI |
| | | RREKLLKGIQEFEHFLLEKEKEDGINHPKHFEQDLNPNEKTYVIN |
| | | GVLRKNSKLNYTEIDKLLDLEHISIKDIETSAKEIHLAYFLIHVRN |
| | | KFGHNQLPKLEAFELMKKYYKKNNEETYAEYFHKVSSQIVNEF |
| | | KNSLEKHS |
| SAMN05421542_0666 | SDI27289.1 | MEKTQTGLGIYYDHTKLQDKYFFGGFFNLAQNNIDNVIKAFIIK |
| [Chryseobacterium | | FFPERKDKDINIAQFLDICFKDNDADSDFQKKNKFLRIHFPVIGF |
| jejuense] | | LTSDNDKAGFKKKFALLLKTISELRNFYTHYYHKSIEFPSELFEL |
| (SEQ ID | | LDDIFVKTTSEIKKLKKKDDKTQQLLNKNLSEEYDIRYQQQIER |
| No. 142) | | LKELKAQGKRVSLTDETAIRNGVFNAAFNHLIYRDGENVKPSR |
| | | LYQSSYSEPDPAENGISLSQNSILFLLSMFLERKETEDLKSRVKG |
| | | FKAKIIKQGEEQISGLKFMATHWVFSYLCFKGIKQKLSTEFHEET |
| | | LLIQIIDELSKVPDEVYSAFDSKTKEKFLEDINEYMKEGNADLSL |
| | | EDSKVIHPVIRKRYENKFNYFAIRFLDEYLSSTSLKFQVHVGNY |
| | | VHDRRVKHINGTGFQTERIVKDRIKVFGRLSNISNLKADYIKEQ |
| | | LELPNDSNGWEIFPNPSYIFIDNNVPIHVLADEATKKGIELFKDK |
| | | RRKEQPEELQKRKGKISKYNIVSMIYKEAKGKDKLRIDEPLALL |
| | | SLNEIPALLYQILEKGATPKDIELIIKNKLTERFEKIKNYDPETPAP |
| | | ASQISKRLRNNTTAKGQEALNAEKLSLLIEREIENTETKLSSIEEK |
| | | RLKAKKEQRRNTPQRSIFSNSDLGRIAAWLADDIKRFMPAEQRK |
| | | NWKGYQHSQLQQSLAYFEKRPQEAFLLLKEGWDTSDGSSYWN |
| | | NWVMNSFLENNHFEKFYKNYLMKRVKYFSELAGNIKQHTHNT |
| | | KFLRKFIKQQMPADLFPKRHYILKDLETEKNKVLSKPLVFSRGL |
| | | FDNNPTFIKGVKVTENPELFAEWYSYGYKTEHVFQHFYGWERD |
| | | YNELLDSELQKGNSFAKNSIYYNRESQLDLIKLKQDLKIKKIKIQ |
| | | DLFLKRIAEKLFENVFNYPTTLSLDEFYLTQEERAEKERIALAQS |
| | | LREEGDNSPNIIKDDFIWSKTIAFRSKQIYEPAIKLKDIGKFNRFV |
| | | LDDEESKASKLLSYDKNKIWNKEQLERELSIGENSYEVIRREKL |
| | | FKEIQNLELQILSNWSWDGINHPREFEMEDQKNTRHPNFKMYL |
| | | VNGILRKNINLYKEDEDFWLESLKENDFKTLPSEVLETKSEMVQ |
| | | LLFLVILIRNQFAHNQLPEIQFYNFIRKNYPEIQNNTVAELYLNLI |
| | | KLAVQKLKDNS |
| SAMN05444360_11366 | SHM52812.1 | MNTRVTGMGVSYDHTKKEDKHFFGGFLNLAQDNITAVIKAFCI |
| [Chryseobacterium | | KFDKNPMSSVQFAESCFTDKDSDTDFQNKVRYVRTHLPVIGYL |
| carnipullorum] | | NYGGDRNTFRQKLSTLLKAVDSLRNFYTHYYHSPLALSTELFEL |
| (SEQ | | LDTVFASVAVEVKQHKMKDDKTRQLLSKSLAEELDIRYKQQLE |
| ID No. | | RLKELKEQGKNIDLRDEAGIRNGVLNAAFNHLIYKEGEIAKPTL |
| 143) | | SYSSFYYGADSAENGITISQSGLLFLLSMFLGKKEIEDLKSRIRGF |
| | | KAKIVRDGEENISGLKFMATHWIFSYLSFKGMKQRLSTDFHEET |
| | | LLIQIIDELSKVPDEVYHDFDTATREKFVEDINEYIREGNEDFSLG |
| | | DSTIIHPVIRKRYENKFNYFAVRFLDEFIKFPSLRFQVHLGNFVH |
| | | DRRIKDIHGTGFQTERVVKDRIKVFGKLSETSSLKTEYIEKELDL |
| | | DSDTGWEIFPNPSYVFIDNNIPIYISTNKTFKNGSSEFIKLRRKEKP |
| | | EEMKMRGEDKKEKRDIASMIGNAGSLNSKTPLAMLSLNEMPAL |
| | | LYEILVKKTTPEEIELIIKEKLDSHFENIKNYDPEKPLPASQISKRL |
| | | RNNTTDKGKKVINPEKLIHLINKEIDATEAKFALLAKNRKELKE |
| | | KFRGKPLRQTIFSNMELGREATWLADDIKRFMPDILRKNWKGY |
| | | QHNQLQQSLAFFNSRPKEAFTILQDGWDFADGSSFWNGWIINSF |
| | | VKNRSFEYFYEAYFEGRKEYFSSLAENIKQHTSNHRNLRRFIDQ |
| | | QMPKGLFENRHYLLENLETEKNKILSKPLVFPRGLFDTKPTFIKG |
| | | IKVDEQPELFAEWYQYGYSTEHVFQNFYGWERDYNDLLESELE |
| | | KDNDFSKNSIHYSRTSQLELIKLKQDLKIKKIKIQDLFLKLIAGHI |
| | | FENIFKYPASFSLDELYLTQEERLNKEQEALIQSQRKEGDHSDNII |
| | | KDNFIGSKTVTYESKQISEPNVKLKDIGKFNRFLLDDKVKTLLS |
| | | YNEDKVWNKNDLDLELSIGENSYEVIRREKLFKKIQNFELQTLT |
| | | DWPWNGTDHPEEFGTTDNKGVNHPNFKMYVVNGILRKHTDW |
| | | FKEGEDNWLENLNETHFKNLSFQELETKSKSIQTAFLIIMIRNQF |
| | | AHNQLPAVQFFEFIQKKYPEIQGSTTSELYLNFINLAVVELLELL |
| | | EK |
| SAMN05421786_1011119 | SIS70481.1 | METQILGNGISYDHTKTEDKHFFGGFLNTAQNNIDLLIKAYISKF |
| [Chryseobacterium | | ESSPRKLNSVQFPDVCFKKNDSDADFQHKLQFIRKHLPVIQYLK |
| ureilyticum] | | YGGNREVLKEKFRLLLQAVDSLRNFYTHFYHKPIQLPNELLTLL |
| (SEQ ID | | DTIFGEIGNEVRQNKMKDDKTRHLLKKNLSEELDFRYQEQLER |
| No. 144) | | LRKLKSEGKKVDLRDTEAIRNGVLNAAFNHLIFKDAEDFKPTVS |
| | | YSSYYYDSDTAENGISISQSGLLFLLSMFLGRREMEDLKSRVRG |
| | | FKARIIKHEEQHVSGLKFMATHWVFSEFCFKGIKTRLNADYHEE |
| | | TLLIQLIDELSKVPDELYRSFDVATRERFIEDINEYIRDGKEDKSL |
| | | IESKIVHPVIRKRYESKFNYFAIRFLDEFVNFPTLRFQVHAGNYV |
| | | HDRRIKSIEGTGFKTERLVKDRIKVFGKLSTISSLKAEYLAKAVN |
| | | ITDDTGWELLPHPSYVFIDNNIPIHLTVDPSFKNGVKEYQEKRKL |
| | | QKPEEMKNRQGGDKMHKPAISSKIGKSKDINPESPVALLSMNEI |
| | | PALLYEILVKKASPEEVEAKIRQKLTAVFERIRDYDPKVPLPASQ |
| | | VSKRLRNNTDTLSYNKEKLVELANKEVEQTERKLALITKNRRE |
| | | CREKVKGKFKRQKVFKNAELGTEATWLANDIKRFMPEEQKKN |
| | | WKGYQHSQLQQSLAFFESRPGEARSLLQAGWDFSDGSSFWNG |
| | | WVMNSFARDNTFDGFYESYLNGRMKYFLRLADNIAQQSSTNK |
| | | LISNFIKQQMPKGLFDRRLYMLEDLATEKNKILSKPLIFPRGIFD |
| | | DKPTFKKGVQVSEEPEAFADWYSYGYDVKHKFQEFYAWDRD |
| | | YEELLREELEKDTAFTKNSIHYSRESQIELLAKKQDLKVKKVRI |
| | | QDLYLKLMAEFLFENVFGHELALPLDQFYLTQEERLKQEQEAIV |
| | | QSQRPKGDDSPNIVKENFIWSKTIPFKSGRVFEPNVKLKDIGKFR |
| | | NLLTDEKVDILLSYNNTEIGKQVIENELIIGAGSYEFIRREQLFKEI |
| | | QQMKRLSLRSVRGMGVPIRLNLK |
| Prevotella | WP_004343581 | MQKQDKLFVDRKKNAIFAFPKYITIMENQEKPEPIYYELTDKHF |
| buccae | | WAAFLNLARHNVYTTINHINRRLEIAELKDDGYMMDIKGSWNE |
| (SEQ ID | | QAKKLDKKVRLRDLIMKHFPFLEAAAYEITNSKSPNNKEQREK |
| No. 145) | | EQSEALSLNNLKNVLFIFLEKLQVLRNYYSHYKYSEESPKPIFET |
| | | SLLKNMYKVFDANVRLVKRDYMHHENIDMQRDFTHLNRKKQ |
| | | VGRTKNIIDSPNFHYHFADKEGNMTIAGLLFFVSLFLDKKDAIW |
| | | MQKKLKGFKDGRNLREQMTNEVFCRSRISLPKLKLENVQTKD |
| | | WMQLDMLNELVRCPKSLYERLREKDRESFKVPFDIFSDDYDAE |
| | | EEPFKNTLVRHQDRFPYFVLRYFDLNEIFEQLRFQIDLGTYHFSI |
| | | YNKRIGDEDEVRHLTHHLYGFARIQDFAQQNQPEVWRKLVKD |
| | | LDYFEASQEPYIPKTAPHYHLENEKIGIKFCSTHNNLFPSLKTEK |
| | | TCNGRSKFNLGTQFTAEAFLSVHELLPMMFYYLLLTKDYSRKE |
| | | SADKVEGIIRKEISNIYAIYDAFANGEINSIADLTCRLQKTNILQG |
| | | HLPKQMISILEGRQKDMEKEAERKIGEMIDDTQRRLDLLCKQTN |
| | | QKIRIGKRNAGLLKSGKIADWLVNDMMRFQPVQKDQNNIPINN |
| | | SKANSTEYRMLQRALALFGSENFRLKAYFNQMNLVGNDNPHP |
| | | FLAETQWEHQTNILSFYRNYLEARKKYLKGLKPQNWKQYQHF |
| | | LILKVQKTNRNTLVTGWKNSFNLPRGIFTQPIREWFEKHNNSKR |
| | | IYDQILSFDRVGFVAKAIPLYFAEEYKDNVQPFYDYPFNIGNKL |
| | | KPQKGQFLDKKERVELWQKNKELFKNYPSEKKKTDLAYLDFL |
| | | SWKKFERELRLIKNQDIVTWLMFKELFNMATVEGLKIGEIHLRD |
| | | IDTNTANEESNNILNRIMPMKLPVKTYETDNKGNILKERPLATF |
| | | YIEETETKVLKQGNFKVLAKDRRLNGLLSFAETTDIDLEKNPITK |
| | | LSVDHELIKYQTTRISIFEMTLGLEKKLINKYPTLPTDSFRNMLE |
| | | RWLQCKANRPELKNYVNSLIAVRNAFSHNQYPMYDATLFAEV |
| | | KKFTLFPSVDTKKIELNIAPQLLEIVGKAIKEIEKSENKN |
| Porphyromonas | WP_005873511 | MNTVPASENKGQSRTVEDDPQYFGLYLNLARENLIEVESHVRIK |
| gingivalis | | FGKKKLNEESLKQSLLCDHLLSVDRWTKVYGHSRRYLPFLHYF |
| (SEQ ID | | DPDSQIEKDHDSKTGVDPDSAQRLIRELYSLLDFLRNDFSHNRL |
| No. 146) | | DGTTFEHLEVSPDISSFITGTYSLACGRAQSRFADFFKPDDFVLA |
| | | KNRKEQLISVADGKECLTVSGLAFFICLFLDREQASGMLSRIRGF |
| | | KRTDENWARAVHETFCDLCIRHPHDRLESSNTKEALLLDMLNE |
| | | LNRCPRILYDMLPEEERAQFLPALDENSMNNLSENSLNEESRLL |
| | | WDGSSDWAEALTKRIRHQDRFPYLMLRFIEEMDLLKGIRFRVD |
| | | LGEIELDSYSKKVGRNGEYDRTITDHALAFGKLSDFQNEEEVSR |
| | | MISGEASYPVRFSLFAPRYAIYDNKIGYCHTSDPVYPKSKTGEK |
| | | RALSNPQSMGFISVHNLRKLLLMELLCEGSFSRMQSDFLRKANR |
| | | ILDETAEGKLQFSALFPEMRHRFIPPQNPKSKDRREKAETTLEKY |
| | | KQEIKGRKDKLNSQLLSAFDMNQRQLPSRLLDEWMNIRPASHS |
| | | VKLRTYVKQLNEDCRLRLRKFRKDGDGKARAIPLVGEMATFLS |
| | | QDIVRMIISEETKKLITSAYYNEMQRSLAQYAGEENRRQFRAIV |
| | | AELHLLDPSSGHPFLSATMETAHRYTEDFYKCYLEKKREWLAK |
| | | TFYRPEQDENTKRRISVFFVPDGEARKLLPLLIRRRMKEQNDLQ |
| | | DWIRNKQAHPIDLPSHLFDSKIMELLKVKDGKKKWNEAFKDW |
| | | WSTKYPDGMQPFYGLRRELNIHGKSVSYIPSDGKKFADCYTHL |
| | | MEKTVQDKKRELRTAGKPVPPDLAADIKRSFHRAVNEREFMLR |
| | | LVQEDDRLMLMAINKMMTDREEDILPGLKNIDSILDEENQFSLA |
| | | VHAKVLEKEGEGGDNSLSLVPATIEIKSKRKDWSKYIRYRYDR |
| | | RVPGLMSHFPEHKATLDEVKTLLGEYDRCRIKIFDWAFALEGAI |
| | | MSDRDLKPYLHESSSREGKSGEHSTLVKMLVEKKGCLTPDESQ |
| | | YLILIRNKAAHNQFPCAAEMPLIYRDVSAKVGSIEGSSAKDLPE |
| | | GSSLVDSLWKKYEMIIRKILPILDPENRFFGKLLNNMSQPINDL |
| Porphyromonas | WP_005874195 | MTEQNEKPYNGTYYTLEDKHFWAAFFNLARHNAYITLAHIDRQ |
| gingivalis | | LAYSKADITNDEDILFFKGQWKNLDNDLERKARLRSLILKHFSF |
| (SEQ ID | | LEGAAYGKKLFESQSSGNKSSKKKELTKKEKEELQANALSLDN |
| No. 147) | | LKSILFDFLQKLKDFRNYYSHYRHPESSELPLFDGNMLQRLYNV |
| | | FDVSVQRVKRDHEHNDKVDPHRHFNHLVRKGKKDKYGNNDN |
| | | PFFKHHFVDREEKVTEAGLLFFVSLFLEKRDAIWMQKKIRGFKG |
| | | GTEAYQQMTNEVFCRSRISLPKLKLESLRTDDWMLLDMLNELV |
| | | RCPKSLYDRLREEDRARFRVPVDILSDEDDTDGTEEDPFKNTLV |
| | | RHQDRFPYFALRYFDLKKVFTSLRFHIDLGTYHFAIYKKNIGEQ |
| | | PEDRHLTRNLYGFGRIQDFAEEHRPEEWKRLVRDLDYFETGDK |
| | | PYITQTTPHYHIEKGKIGLRFVPEGQLLWPSPEVGATRTGRSKY |
| | | AQDKRFTAEAFLSVHELMPMMFYYFLLREKYSEEASAEKVQG |
| | | RIKRVIEDVYAVYDAFARDEINTRDELDACLADKGIRRGHLPRQ |
| | | MIAILSQEHKDMEEKVRKKLQEMIADTDHRLDMLDRQTDRKIR |
| | | IGRKNAGLPKSGVIADWLVRDMMRFQPVAKDTSGKPLNNSKA |
| | | NSTEYRMLQRALALFGGEKERLTPYFRQMNLTGGNNPHPFLHE |
| | | TRWESHTNILSFYRSYLKARKAFLQSIGRSDREENHRFLLLKEPK |
| | | TDRQTLVAGWKSEFHLPRGIFTEAVRDCLIEMGYDEVGSYKEV |
| | | GFMAKAVPLYFERACKDRVQPFYDYPFNVGNSLKPKKGRFLSK |
| | | EKRAEEWESGKERFRDLEAWSHSAARRIEDAFVGIEYASWENK |
| | | KKIEQLLQDLSLWETFESKLKVKADKINIAKLKKEILEAKEHPY |
| | | HDFKSWQKFERELRLVKNQDIITWMMCRDLMEENKVEGLDTG |
| | | TLYLKDIRTDVQEQGSLNVLNHVKPMRLPVVVYRADSRGHVH |
| | | KEEAPLATVYIEERDTKLLKQGNFKSFVKDRRLNGLFSFVDTGA |
| | | LAMEQYPISKLRVEYELAKYQTARVCAFEQTLELEESLLTRYPH |
| | | LPDESFREMLESWSDPLLDKWPDLQREVRLLIAVRNAFSHNQY |
| | | PMYDETIFSSIRKYDPSSLDAIEERMGLNIAHRLSEEVKLAKEMV |
| | | ERIIQA |
| Prevotella | WP_006044833 | MKEEEKGKTPVVSTYNKDDKHFWAAFLNLARHNVYITVNHIN |
| pallens | | KILGEGEINRDGYENTLEKSWNEIKDINKKDRLSKLIIKHFPFLE |
| (SEQ ID | | VTTYQRNSADTTKQKEEKQAEAQSLESLKKSFFVFIYKLRDLRN |
| No. 148) | | HYSHYKHSKSLERPKFEEDLQEKMYNIFDASIQLVKEDYKHNT |
| | | DIKTEEDFKHLDRKGQFKYSFADNEGNITESGLLFFVSLFLEKK |
| | | DAIWVQKKLEGFKCSNESYQKMTNEVFCRSRMLLPKLRLQSTQ |
| | | TQDWILLDMLNELIRCPKSLYERLREEDRKKFRVPIEIADEDYD |
| | | AEQEPFKNALVRHQDRFPYFALRYFDYNEIFTNLRFQIDLGTYH |
| | | FSIYKKQIGDYKESHHLTHKLYGFERIQEFTKQNRPDEWRKFVK |
| | | TFNSFETSKEPYIPETTPHYHLENQKIGIRFRNDNDKIWPSLKTNS |
| | | EKNEKSKYKLDKSFQAEAFLSVHELLPMMFYYLLLKTENTDND |
| | | NEIETKKKENKNDKQEKHKIEEIIENKITEIYALYDAFANGKINSI |
| | | DKLEEYCKGKDIEIGHLPKQMIAILKSEHKDMATEAKRKQEEM |
| | | LADVQKSLESLDNQINEEIENVERKNSSLKSGEIASWLVNDMM |
| | | RFQPVQKDNEGNPLNNSKANSTEYQMLQRSLALYNKEEKPTRY |
| | | FRQVNLIESSNPHPFLNNTEWEKCNNILSFYRSYLEAKKNFLESL |
| | | KPEDWEKNQYFLMLKEPKTNCETLVQGWKNGFNLPRGIFTEPI |
| | | RKWFMEHRKNITVAELKRVGLVAKVIPLFFSEEYKDSVQPFYN |
| | | YLFNVGNINKPDEKNFLNCEERRELLRKKKDEFKKMTDKEKEE |
| | | NPSYLEFQSWNKFERELRLVRNQDIVTWLLCMELFNKKKIKEL |
| | | NVEKIYLKNINTNTTKKEKNTEEKNGEEKIIKEKNNILNRIMPMR |
| | | LPIKVYGRENFSKNKKKKIRRNTFFTVYIEEKGTKLLKQGNFKA |
| | | LERDRRLGGLFSFVKTHSKAESKSNTISKSRVEYELGEYQKARIE |
| | | IIKDMLALEETLIDKYNSLDTDNFHNMLTGWLKLKDEPDKASF |
| | | QNDVDLLIAVRNAFSHNQYPMRNRIAFANINPFSLSSANTSEEK |
| | | GLGIANQLKDKTHKTIEKIIEIEKPIETKE |
| Myroides | WP_006261414 | MKDILTTDTTEKQNRFYSHKIADKYFFGGYFNLASNNIYEVFEE |
| odoratimimus | | VNKRNTFGKLAKRDNGNLKNYIIHVFKDELSISDFEKRVAIFAS |
| (SEQ ID | | YFPILETVDKKSIKERNRTIDLTLSQRIRQFREMLISLVTAVDQLR |
| No. 149) | | NFYTHYHHSEIVIENKVLDFLNSSLVSTALHVKDKYLKTDKTKE |
| | | FLKETIAAELDILIEAYKKKQIEKKNTRFKANKREDILNAIYNEA |
| | | FWSFINDKDKDKETVVAKGADAYFEKNHHKSNDPDFALNISEK |
| | | GIVYLLSFFLTNKEMDSLKANLTGFKGKVDRESGNSIKYMATQ |
| | | RIYSFHTYRGLKQKIRTSEEGVKETLLMQMIDELSKVPNVVYQH |
| | | LSTTQQNSFIEDWNEYYKDYEDDVETDDLSRVIHPVIRKRYEDR |
| | | FNYFAIRFLDEFFDFPTLRFQVHLGDYVHDRRTKQLGKVESDRII |
| | | KEKVTVFARLKDINSAKANYFHSLEEQDKEELDNKWTLFPNPS |
| | | YDFPKEHTLQHQGEQKNAGKIGIYVKLRDTQYKEKAALEEARK |
| | | SLNPKERSATKASKYDIITQIIEANDNVKSEKPLVFTGQPIAYLS |
| | | MNDIHSMLFSLLTDNAELKKTPEEVEAKLIDQIGKQINEILSKDT |
| | | DTKILKKYKDNDLKETDTDKITRDLARDKEEIEKLILEQKQRAD |
| | | DYNYTSSTKFNIDKSRKRKHLLFNAEKGKIGVWLANDIKRFMT |
| | | EEFKSKWKGYQHTELQKLFAYYDTSKSDLDLILSDMVMVKDY |
| | | PIELIALVKKSRTLVDFLNKYLEARLGYMENVITRVKNSIGTPQF |
| | | KTVRKECFTFLKKSNYTVVSLDKQVERILSMPLFIERGFMDDKP |
| | | TMLEGKSYQQHKEKFADWFVHYKENSNYQNFYDTEVYEITTE |
| | | DKREKAKVTKKIKQQQKNDVFTLMMVNYMLEEVLKLSSNDRL |
| | | SLNELYQTKEERIVNKQVAKDTQERNKNYIWNKVVDLQLCEG |
| | | LVRIDKVKLKDIGNFRKYENDSRVKEFLTYQSDIVWSAYLSNEV |
| | | DSNKLYVIERQLDNYESIRSKELLKEVQEIECSVYNQVANKESL |
| | | KQSGNENFKQYVLQGLVPIGMDVREMLILSTDVKFIKEEIIQLG |
| | | QAGEVEQDLYSLIYIRNKFAHNQLPIKEFFDFCENNYRSISDNEY |
| | | YAEYYMEIFRSIKEKYTS |
| Myroides | WP_006265509 | MKDILTTDTTEKQNRFYSHKIADKYFFGGYFNLASNNIYEVFEE |
| odoratimimus | | VNKRNTFGKLAKRDNGNLKNYIIHVFKDELSISDFEKRVAIFAS |
| (SEQ ID | | YFPILETVDKKSIKERNRTIDLTLSQRIRQFREMLISLVTAVDQLR |
| No. 150) | | NFYTHYHHSEIVIENKVLDFLNSSLVSTALHVKDKYLKTDKTKE |
| | | FLKETIAAELDILIEAYKKKQIEKKNTRFKANKREDILNAIYNEA |
| | | FWSFINDKDKDKETVVAKGADAYFEKNHHKSNDPDFALNISEK |
| | | GIVYLLSFFLTNKEMDSLKANLTGFKGKVDRESGNSIKYMATQ |
| | | RIYSFHTYRGLKQKIRTSEEGVKETLLMQMIDELSKVPNVVYQH |
| | | LSTTQQNSFIEDWNEYYKDYEDDVETDDLSRVIHPVIRKRYEDR |
| | | FNYFAIRFLDEFFDFPTLRFQVHLGDYVHDRRTKQLGKVESDRII |
| | | KEKVTVFARLKDINSAKASYFHSLEEQDKEELDNKWTLFPNPS |
| | | YDFPKEHTLQHQGEQKNAGKIGIYVKLRDTQYKEKAALEEARK |
| | | SLNPKERSATKASKYDIITQIIEANDNVKSEKPLVFTGQPIAYLS |
| | | MNDIHSMLFSLLTDNAELKKTPEEVEAKLIDQIGKQINEILSKDT |
| | | DTKILKKYKDNDLKETDTDKITRDLARDKEEIEKLILEQKQRAD |
| | | DYNYTSSTKFNIDKSRKRKHLLFNAEKGKIGVWLANDIKRFMF |
| | | KESKSKWKGYQHTELQKLFAYFDTSKSDLELILSDMVMVKDYP |
| | | IELIDLVRKSRTLVDFLNKYLEARLGYIENVITRVKNSIGTPQFKT |
| | | VRKECFAFLKESNYTVASLDKQIERILSMPLFIERGFMDSKPTML |
| | | EGKSYQQHKEDFADWFVHYKENSNYQNFYDTEVYEIITEDKRE |
| | | QAKVTKKIKQQQKNDVFTLMMVNYMLEEVLKLPSNDRLSLNE |
| | | LYQTKEERIVNKQVAKDTQERNKNYIWNKVVDLQLCEGLVRID |
| | | KVKLKDIGNFRKYENDSRVKEFLTYQSDIVWSGYLSNEVDSNK |
| | | LYVIERQLDNYESIRSKELLKEVQEIECIVYNQVANKESLKQSGN |
| | | ENFKQYVLQGLLPRGTDVREMLILSTDVKFKKEEIMQLGQVRE |
| | | VEQDLYSLIYIRNKFAHNQLPIKEFFDFCENNYRPISDNEYYAEY |
| | | YMEIFRSIKEKYAS |
| Prevotella | WP_007412163 | MQKQDKLFVDRKKNAIFAFPKYITIMENQEKPEPIYYELTDKHF |
| sp. MSX73 | | WAAFLNLARHNVYTTINHINRRLEIAELKDDGYMMGIKGSWNE |
| (SEQ ID | | QAKKLDKKVRLRDLIMKHFPFLEAAAYEITNSKSPNNKEQREK |
| No. 151) | | EQSEALSLNNLKNVLFIFLEKLQVLRNYYSHYKYSEESPKPIFET |
| | | SLLKNMYKVFDANVRLVKRDYMHHENIDMQRDFTHLNRKKQ |
| | | VGRTKNIIDSPNFHYHFADKEGNMTIAGLLFFVSLFLDKKDAIW |
| | | MQKKLKGFKDGRNLREQMTNEVFCRSRISLPKLKLENVQTKD |
| | | WMQLDMLNELVRCPKSLYERLREKDRESFKVPFDIFSDDYDAE |
| | | EEPFKNTLVRHQDRFPYFVLRYFDLNEIFEQLRFQIDLGTYHFSI |
| | | YNKRIGDEDEVRHLTHHLYGFARIQDFAPQNQPEEWRKLVKDL |
| | | DHFETSQEPYISKTAPHYHLENEKIGIKFCSTHNNLFPSLKREKT |
| | | CNGRSKFNLGTQFTAEAFLSVHELLPMMFYYLLLTKDYSRKES |
| | | ADKVEGIIRKEISNIYAIYDAFANNEINSIADLTCRLQKTNILQGH |
| | | LPKQMISILEGRQKDMEKEAERKIGEMIDDTQRRLDLLCKQTNQ |
| | | KIRIGKRNAGLLKSGKIADWLVSDMMRFQPVQKDTNNAPINNS |
| | | KANSTEYRMLQHALALFGSESSRLKAYFRQMNLVGNANPHPFL |
| | | AETQWEHQTNILSFYRNYLEARKKYLKGLKPQNWKQYQHFLIL |
| | | KVQKTNRNTLVTGWKNSFNLPRGIFTQPIREWFEKHNNSKRIYD |
| | | QILSFDRVGFVAKAIPLYFAEEYKDNVQPFYDYPFNIGNKLKPQ |
| | | KGQFLDKKERVELWQKNKELFKNYPSEKNKTDLAYLDFLSWK |
| | | KFERELRLIKNQDIVTWLMFKELFKTTTVEGLKIGEIHLRDIDTN |
| | | TANEESNNILNRIMPMKLPVKTYETDNKGNILKERPLATFYIEET |
| | | ETKVLKQGNFKVLAKDRRLNGLLSFAETTDIDLEKNPITKLSVD |
| | | YELIKYQTTRISIFEMTLGLEKKLIDKYSTLPTDSFRNMLERWLQ |
| | | CKANRPELKNYVNSLIAVRNAFSHNQYPMYDATLFAEVKKFTL |
| | | FPSVDTKKIELNIAPQLLEIVGKAIKEIEKSENKN |
| Porphyromonas | WP_012458414 | MTEQNERPYNGTYYTLEDKHFWAAFFNLARHNAYITLAHIDRQ |
| gingivalis | | LAYSKADITNDEDILFFKGQWKNLDNDLERKARLRSLILKHFSF |
| (SEQ ID | | LEGAAYGKKLFESQSSGNKSSKKKELTKKEKEELQANALSLDN |
| No. 152) | | LKSILFDFLQKLKDFRNYYSHYRHPESSELPLFDGNMLQRLYNV |
| | | FDVSVQRVKRDHEHNDKVDPHRHFNHLVRKGKKDRYGNNDN |
| | | PFFKHHFVDREEKVTEAGLLFFVSLFLEKRDAIWMQKKIRGFKG |
| | | GTETYQQMTNEVFCRSRISLPKLKLESLRTDDWMLLDMLNELV |
| | | RCPKSLYDRLREEDRARFRVPVDILSDEDDTDGTEEDPFKNTLV |
| | | RHQDRFPYFALRYFDLKKVFTSLRFHIDLGTYHFAIYKKNIGEQ |
| | | PEDRHLTRNLYGFGRIQDFAEEHRPEEWKRLVRDLDYFETGDK |
| | | PYITQTTPHYHIEKGKIGLRFVPEGQHLWPSPEVGATRTGRSKY |
| | | AQDKRLTAEAFLSVHELMPMMFYYFLLREKYSDEASAERVQG |
| | | RIKRVIEDVYAVYDAFARGEINTRDELDACLADKGIRRGHLPRQ |
| | | MIGILSQEHKDMEEKVRKKLQEMIVDTDHRLDMLDRQTDRKIR |
| | | IGRKNAGLPKSGVIADWLVRDMMRFQPVAKDTSGKPLNNSKA |
| | | NSTEYRMLQRALALFGGEKERLTPYFRQMNLTGGNNPHPFLHE |
| | | TRWESHTNILSFYRSYLKARKAFLQSIGRSDRVENHRFLLLKEP |
| | | KTDRQTLVAGWKGEFHLPRGIFTEAVRDCLIEMGLDEVGSYKE |
| | | VGFMAKAVPLYFERACKDRVQPFYDYPFNVGNSLKPKKGRFLS |
| | | KEKRAEEWESGKERFRLAKLKKEILEAKEHPYLDFKSWQKFER |
| | | ELRLVKNQDIITWMICRDLMEENKVEGLDTGTLYLKDIRTDVQ |
| | | EQGNLNVLNRVKPMRLPVVVYRADSRGHVHKEQAPLATVYIE |
| | | ERDTKLLKQGNFKSFVKDRRLNGLFSFVDTGALAMEQYPISKL |
| | | RVEYELAKYQTARVCAFEQTLELEESLLTRYPHLPDKNFRKML |
| | | ESWSDPLLDKWPDLHGNVRLLIAVRNAFSHNQYPMYDEAVFSS |
| | | IRKYDPSSPDAIEERMGLNIAHRLSEEVKQAKEMAERIIQA |
| Paludibacter | WP_013446107 | MKTSANNIYFNGINSFKKIFDSKGAIAPIAEKSCRNFDIKAQNDV |
| propionicigenes | | NKEQRIHYFAVGHTFKQLDTENLFEYVLDENLRAKRPTRFISLQ |
| (SEQ | | QFDKEFIENIKRLISDIRNINSHYIHRFDPLKIDAVPTNIIDFLKESF |
| ID No. | | ELAVIQIYLKEKGINYLQFSENPHADQKLVAFLHDKFLPLDEKK |
| 153) | | TSMLQNETPQLKEYKEYRKYFKTLSKQAAIDQLLFAEKETDYI |
| | | WNLFDSHPVLTISAGKYLSFYSCLFLLSMFLYKSEANQLISKIKG |
| | | FKKNTTEEEKSKREIFTFFSKRFNSMDIDSEENQLVKFRDLILYL |
| | | NHYPVAWNKDLELDSSNPAMTDKLKSKIIELEINRSFPLYEGNE |
| | | RFATFAKYQIWGKKHLGKSIEKEYINASFTDEEITAYTYETDTCP |
| | | ELKDAHKKLADLKAAKGLFGKRKEKNESDIKKTETSIRELQHEP |
| | | NPIKDKLIQRIEKNLLTVSYGRNQDRFMDFSARFLAEINYFGQD |
| | | ASFKMYHFYATDEQNSELEKYELPKDKKKYDSLKFHQGKLVH |
| | | FISYKEHLKRYESWDDAFVIENNAIQLKLSFDGVENTVTIQRAL |
| | | LIYLLEDALRNIQNNTAENAGKQLLQEYYSHNKADLSAFKQILT |
| | | QQDSIEPQQKTEFKKLLPRRLLNNYSPAINHLQTPHSSLPLILEK |
| | | ALLAEKRYCSLVVKAKAEGNYDDFIKRNKGKQFKLQFIRKAW |
| | | NLMYFRNSYLQNVQAAGHHKSFHIERDEFNDFSRYMFAFEELS |
| | | QYKYYLNEMFEKKGFFENNEFKILFQSGTSLENLYEKTKQKFEI |
| | | WLASNTAKTNKPDNYHLNNYEQQFSNQLFFINLSHFINYLKSTG |
| | | KLQTDANGQIIYEALNNVQYLIPEYYYTDKPERSESKSGNKLYN |
| | | KLKATKLEDALLYEMAMCYLKADKQIADKAKHPITKLLTSDVE |
| | | FNITNKEGIQLYHLLVPFKKIDAFIGLKMHKEQQDKKHPTSFLA |
| | | NIVNYLELVKNDKDIRKTYEAFSTNPVKRTLTYDDLAKIDGHLI |
| | | SKSIKFTNVTLELERYFIFKESLIVKKGNNIDFKYIKGLRNYYNN |
| | | EKKKNEGIRNKAFHFGIPDSKSYDQLIRDAEVMFIANEVKPTHA |
| | | TKYTDLNKQLHTVCDKLMETVHNDYFSKEGDGKKKREAAGQ |
| | | KYFENIISAK |
| Porphyromonas | WP_013816155 | MTEQNEKPYNGTYYTLEDKHFWAAFFNLARHNAYITLAHIDRQ |
| gingivalis | | LAYSKADITNDEDILFFKGQWKNLDNDLERKARLRSLILKHFSF |
| (SEQ ID | | LEGAAYGKKLFESQSSGNKSSKNKELTKKEKEELQANALSLDN |
| No. 154) | | LKSILFDFLQKLKDFRNYYSHYRHPESSELPLFDGNMLQRLYNV |
| | | FDVSVQRVKRDHEHNDKVDPHRHFNHLVRKGKKDRYGNNDN |
| | | PFFKHHFVDREGTVTEAGLLFFVSLFLEKRDAIWMQKKIRGFKG |
| | | GTETYQQMTNEVFCRSRISLPKLKLESLRTDDWMLLDMLNELV |
| | | RCPKSLYDRLREEDRARFRVPVDILSDEEDTDGAEEDPFKNTLV |
| | | RHQDRFPYFALRYFDLKKVFTSLRFQIDLGTYHFAIYKKNIGEQ |
| | | PEDRHLTRNLYGFGRIQDFAEEHRPEEWKRLVRDLDYFETGDK |
| | | PYITQTTPHYHIEKGKIGLRFVPEGQHLWPSPEVGATRTGRSKY |
| | | AQDKRFTAEAFLSAHELMPMMFYYFLLREKYSEEASAERVQGR |
| | | IKRVIEDVYAVYDAFARDEINTRDELDACLADKGIRRGHLPRQ |
| | | MIGILSQEHKDMEEKIRKKLQEMMADTDHRLDMLDRQTDRKIR |
| | | IGRKNAGLPKSGVIADWLVRDMMRFQPVAKDTSGKPLNNSKA |
| | | NSTEYRMLQRALALFGGEKERLTPYFRQMNLTGGNNPHPFLHE |
| | | TRWESHTNILSFYRSYLKARKAFLQSIGRSDRVENHRFLLLKEP |
| | | KTDRQTLVAGWKGEFHLPRGIFTEAVRDCLIEMGLDEVGSYKE |
| | | VGFMAKAVPLYFERACKDWVQPFYNYPFNVGNSLKPKKGRFL |
| | | SKEKRAEEWESGKERFRLAKLKKEILEAKEHPYLDFKSWQKFE |
| | | RELRLVKNQDIITWMICGDLMEENKVEGLDTGTLYLKDIRTDV |
| | | QEQGSLNVLNRVKPMRLPVVVYRADSRGHVHKEQAPLATVYI |
| | | EERDTKLLKQGNFKSFVKDRRLNGLFSFVDTGALAMEQYPISK |
| | | LRVEYELAKYQTARVCAFEQTLELEESLLTRCPHLPDKNFRKM |
| | | LESWSDPLLDKWPDLHRKVRLLIAVRNAFSHNQYPMYDEAVFS |
| | | SIRKYDPSFPDAIEERMGLNIAHRLSEEVKQAKETVERIIQA |
| Flavobacterium | WP_014165541 | MSSKNESYNKQKTFNHYKQEDKYFFGGFLNNADDNLRQVGKE |
| columnare | | FKTRINFNHNNNELASVFKDYFNKEKSVAKREHALNLLSNYFP |
| (SEQ ID | | VLERIQKHTNHNFEQTREIFELLLDTIKKLRDYYTHHYHKPITIN |
| No. 155) | | PKIYDFLDDTLLDVLITIKKKKVKNDTSRELLKEKLRPELTQLKN |
| | | QKREELIKKGKKLLEENLENAVFNHCLRPFLEENKTDDKQNKT |
| | | VSLRKYRKSKPNEETSITLTQSGLVFLMSFFLHRKEFQVFTSGLE |
| | | GFKAKVNTIKEEEISLNKNNIVYMITHWSYSYYNFKGLKHRIKT |
| | | DQGVSTLEQNNTTHSLTNTNTKEALLTQIVDYLSKVPNEIYETL |
| | | SEKQQKEFEEDINEYMRENPENEDSTFSSIVSHKVIRKRYENKFN |
| | | YFAMRFLDEYAELPTLRFMVNFGDYIKDRQKKILESIQFDSERII |
| | | KKEIHLFEKLSLVTEYKKNVYLKETSNIDLSRFPLFPNPSYVMA |
| | | NNNIPFYIDSRSNNLDEYLNQKKKAQSQNKKRNLTFEKYNKEQ |
| | | SKDAIIAMLQKEIGVKDLQQRSTIGLLSCNELPSMLYEVIVKDIK |
| | | GAELENKIAQKIREQYQSIRDFTLDSPQKDNIPTTLIKTINTDSSV |
| | | TFENQPIDIPRLKNAIQKELTLTQEKLLNVKEHEIEVDNYNRNKN |
| | | TYKFKNQPKNKVDDKKLQRKYVFYRNEIRQEANWLASDLIHF |
| | | MKNKSLWKGYMHNELQSFLAFFEDKKNDCIALLETVFNLKED |
| | | CILTKGLKNLFLKHGNFIDFYKEYLKLKEDFLNTESTFLENGLIG |
| | | LPPKILKKELSKRFKYIFIVFQKRQFIIKELEEKKNNLYADAINLS |
| | | RGIFDEKPTMIPFKKPNPDEFASWFVASYQYNNYQSFYELTPDI |
| | | VERDKKKKYKNLRAINKVKIQDYYLKLMVDTLYQDLFNQPLD |
| | | KSLSDFYVSKAEREKIKADAKAYQKRNDSSLWNKVIHLSLQNN |
| | | RITANPKLKDIGKYKRALQDEKIATLLTYDDRTWTYALQKPEK |
| | | ENENDYKELHYTALNMELQEYEKVRSKELLKQVQELEKQILEE |
| | | YTDFLSTQIHPADFEREGNPNFKKYLAHSILENEDDLDKLPEKV |
| | | EAMRELDETITNPIIKKAIVLIIIRNKMAHNQYPPKFIYDLANRFV |
| | | PKKEEEYFATYFNRVFETITKELWENKEKKDKTQV |
| Psychroflexus | WP_015024765 | MESIIGLGLSFNPYKTADKHYFGSFLNLVENNLNAVFAEFKERIS |
| torquis | | YKAKDENISSLIEKHFIDNMSIVDYEKKISILNGYLPIIDFLDDELE |
| (SEQ ID | | NNLNTRVKNFKKNFIILAEAIEKLRDYYTHFYHDPITFEDNKEPL |
| No. 156) | | LELLDEVLLKTILDVKKKYLKTDKTKEILKDSLREEMDLLVIRK |
| | | TDELREKKKTNPKIQHTDSSQIKNSIFNDAFQGLLYEDKGNNKK |
| | | TQVSHRAKTRLNPKDIHKQEERDFEIPLSTSGLVFLMSLFLSKKE |
| | | IEDFKSNIKGFKGKVVKDENHNSLKYMATHRVYSILAFKGLKY |
| | | RIKTDTFSKETLMMQMIDELSKVPDCVYQNLSETKQKDFIEDW |
| | | NEYFKDNEENTENLENSRVVHPVIRKRYEDKFNYFAIRFLDEFA |
| | | NFKTLKFQVFMGYYIHDQRTKTIGTTNITTERTVKEKINVFGKL |
| | | SKMDNLKKHFFSQLSDDENTDWEFFPNPSYNFLTQADNSPANN |
| | | IPIYLELKNQQIIKEKDAIKAEVNQTQNRNPNKPSKRDLLNKILK |
| | | TYEDFHQGDPTAILSLNEIPALLHLFLVKPNNKTGQQIENIIRIKIE |
| | | KQFKAINHPSKNNKGIPKSLFADTNVRVNAIKLKKDLEAELDM |
| | | LNKKHIAFKENQKASSNYDKLLKEHQFTPKNKRPELRKYVFYK |
| | | SEKGEEATWLANDIKRFMPKDFKTKWKGCQHSELQRKLAFYD |
| | | RHTKQDIKELLSGCEFDHSLLDINAYFQKDNFEDFFSKYLENRIE |
| | | TLEGVLKKLHDFKNEPTPLKGVFKNCFKFLKRQNYVTESPEIIK |
| | | KRILAKPTFLPRGVFDERPTMKKGKNPLKDKNEFAEWFVEYLE |
| | | NKDYQKFYNAEEYRMRDADFKKNAVIKKQKLKDFYTLQMVN |
| | | YLLKEVFGKDEMNLQLSELFQTRQERLKLQGIAKKQMNKETG |
| | | DSSENTRNQTYIWNKDVPVSFFNGKVTIDKVKLKNIGKYKRYE |
| | | RDERVKTFIGYEVDEKWMMYLPHNWKDRYSVKPINVIDLQIQE |
| | | YEEIRSHELLKEIQNLEQYIYDHTTDKNILLQDGNPNFKMYVLN |
| | | GLLIGIKQVNIPDFIVLKQNTNFDKIDFTGIASCSELEKKTIILIAIR |
| | | NKFAHNQLPNKMIYDLANEFLKIEKNETYANYYLKVLKKMISD |
| | | LA |
| Riemerella | WP_015345620 | MFFSFHNAQRVIFKHLYKAFDASLRMVKEDYKAHFTVNLTRDF |
| anatipestifer | | AHLNRKGKNKQDNPDFNRYRFEKDGFFTESGLLFFTNLFLDKR |
| (SEQ ID | | DAYWMLKKVSGFKASHKQREKMTTEVFCRSRILLPKLRLESRY |
| No. 157) | | DHNQMLLDMLSELSRCPKLLYEKLSEENKKHFQVEADGFLDEI |
| | | EEEQNPFKDTLIRHQDRFPYFALRYLDLNESFKSIRFQVDLGTYH |
| | | YCIYDKKIGDEQEKRHLTRTLLSFGRLQDFTEINRPQEWKALTK |
| | | DLDYKETSNQPFISKTTPHYHITDNKIGFRLGTSKELYPSLEIKDG |
| | | ANRIAKYPYNSGFVAHAFISVHELLPLMFYQHLTGKSEDLLKET |
| | | VRHIQRIYKDFEEERINTIEDLEKANQGRLPLGAFPKQMLGLLQ |
| | | NKQPDLSEKAKIKIEKLIAETKLLSHRLNTKLKSSPKLGKRREKL |
| | | IKTGVLADWLVKDFMRFQPVAYDAQNQPIKSSKANSTEFWFIR |
| | | RALALYGGEKNRLEGYFKQTNLIGNTNPHPFLNKFNWKACRNL |
| | | VDFYQQYLEQREKFLEAIKHQPWEPYQYCLLLKVPKENRKNLV |
| | | KGWEQGGISLPRGLFTEAIRETLSKDLTLSKPIRKEIKKHGRVGFI |
| | | SRAITLYFKEKYQDKHQSFYNLSYKLEAKAPLLKKEEHYEYWQ |
| | | QNKPQSPTESQRLELHTSDRWKDYLLYKRWQHLEKKLRLYRN |
| | | QDIMLWLMTLELTKNHFKELNLNYHQLKLENLAVNVQEADAK |
| | | LNPLNQTLPMVLPVKVYPTTAFGEVQYHETPIRTVYIREEQTKA |
| | | LKMGNFKALVKDRRLNGLFSFIKEENDTQKHPISQLRLRRELEI |
| | | YQSLRVDAFKETLSLEEKLLNKHASLSSLENEFRTLLEEWKKKY |
| | | AASSMVTDKHIAFIASVRNAFCHNQYPFYKETLHAPILLFTVAQ |
| | | PTTEEKDGLGIAEALLKVLREYCEIVKSQI |
| Prevotella | WP_021584635 | MENDKRLEESACYTLNDKHFWAAFLNLARHNVYITVNHINKTL |
| pleuritidis | | ELKNKKNQEIIIDNDQDILAIKTHWAKVNGDLNKTDRLRELMIK |
| (SEQ ID | | HFPFLEAAIYSNNKEDKEEVKEEKQAKAQSFKSLKDCLFLFLEK |
| No. 158) | | LQEARNYYSHYKYSESSKEPEFEEGLLEKMYNTFDASIRLVKED |
| | | YQYNKDIDPEKDFKHLERKEDFNYLFTDKDNKGKITKNGLLFF |
| | | VSLFLEKKDAIWMQQKFRGFKDNRGNKEKMTHEVFCRSRMLL |
| | | PKIRLESTQTQDWILLDMLNELIRCPKSLYERLQGAYREKFKVP |
| | | FDSIDEDYDAEQEPFRNTLVRHQDRFPYFALRYFDYNEIFKNLR |
| | | FQIDLGTYHFSIYKKLIGGKKEDRHLTHKLYGFERIQEFTKQNRP |
| | | DKWQAIIKDLDTYETSNERYISETTPHYHLENQKIGIRFRNDNN |
| | | DIWPSLKTNGEKNEKSKYNLDKPYQAEAFLSVHELLPMMFYYL |
| | | LLKMENTDNDKEDNEVGTKKKGNKNNKQEKHKIEEIIENKIKDI |
| | | YALYDAFTNGEINSIDELAEQREGKDIEIGHLPKQLIVILKNKSK |
| | | DMAEKANRKQKEMIKDTKKRLATLDKQVKGEIEDGGRNIRLL |
| | | KSGEIARWLVNDMMRFQPVQKDNEGKPLNNSKANSTEYQMLQ |
| | | RSLALYNKEEKPTRYFRQVNLIKSSNPHPFLEDTKWEECYNILSF |
| | | YRNYLKAKIKFLNKLKPEDWKKNQYFLMLKEPKTNRKTLVQG |
| | | WKNGFNLPRGIFTEPIKEWFKRHQNDSEEYKKVEALDRVGLVA |
| | | KVIPLFFKEEYFKEDAQKEINNCVQPFYSFPYNVGNIHKPEEKNF |
| | | LHCEERRKLWDKKKDKFKGYKAKEKSKKMTDKEKEEHRSYLE |
| | | FQSWNKFERELRLVRNQDILTWLLCTKLIDKLKIDELNIEELQKL |
| | | RLKDIDTDTAKKEKNNILNRVMPMRLPVTVYEIDKSFNIVKDKP |
| | | LHTVYIEETGTKLLKQGNFKALVKDRRLNGLFSFVKTSSEAESK |
| | | SKPISKLRVEYELGAYQKARIDIIKDMLALEKTLIDNDENLPTNK |
| | | FSDMLKSWLKGKGEANKARLQNDVGLLVAVRNAFSHNQYPM |
| | | YNSEVFKGMKLLSLSSDIPEKEGLGIAKQLKDKIKETIERIIEIEKE |
| | | IRN |
| Porphyromonas | WP_021663197 | MNTVPASENKGQSRTVEDDPQYFGLYLNLARENLIEVESHVRIK |
| gingivalis | | FGKKKLNEESLKQSLLCDHLLSVDRWTKVYGHSRRYLPFLHYF |
| (SEQ ID | | DPDSQIEKDHDSKTGVDPDSAQRLIRELYSLLDFLRNDFSHNRL |
| No. 159) | | DGTTFEHLEVSPDISSFITGTYSLACGRAQSRFADFFKPDDFVLA |
| | | KNRKEQLISVADGKECLTVSGLAFFICLFLDREQASGMLSRIRGF |
| | | KRTDENWARAVHETFCDLCIRHPHDRLESSNTKEALLLDMLNE |
| | | LNRCPRILYDMLPEEERAQFLPALDENSMNNLSENSLNEESRLL |
| | | WDGSSDWAEALTKRIRHQDRFPYLMLRFIEEMDLLKGIRFRVD |
| | | LGEIELDSYSKKVGRNGEYDRTITDHALAFGKLSDFQNEEEVSR |
| | | MISGEASYPVRFSLFAPRYAIYDNKIGYCHTSDPVYPKSKTGEK |
| | | RALSNPRSMGFISVHDLRKLLLMELLCEGSFSRMQSDFLRKANR |
| | | ILDETAEGKLQFSALFPEMRHRFIPPQNPKSKDRREKAETTLEKY |
| | | KQEIKGRKDKLNSQLLSAFDMDQRQLPSRLLDEWMNIRPASHS |
| | | VKLRTYVKQLNEDCRLRLQKFRKDGDGKARAIPLVGEMATFLS |
| | | QDIVRMIISEETKKLITSAYYNEMQRSLAQYAGEENRHQFRAIV |
| | | AELRLLDPSSGHPFLSATMETAHRYTEDFYKCYLEKKREWLAK |
| | | TFYRPEQDENTKRRISVFFVPDGEARKLLPLLIRRRMKEQNDLQ |
| | | DWIRNKQAHPIDLPSHLFDSKIMELLKVKDGKKKWNEAFKDW |
| | | WSTKYPDGMQPFYGLRRELNIHGKSVSYIPSDGKKFADCYTHL |
| | | MEKTVQDKKRELRTAGKPVPPDLAADIKRSFHRAVNEREFMLR |
| | | LVQEDDRLMLMAINKMMTDREEDILPGLKNIDSILDEENQFSLA |
| | | VHAKVLEKEGEGGDNSLSLVPATIEIKSKRKDWSKYIRYRYDR |
| | | RVPGLMSHFPEHKATLDEVKTLLGEYDRCRIKIFDWAFALEGAI |
| | | MSDRDLKPYLHESSSREGKSGEHSTLVKMLVEKKGCLTPDESQ |
| | | YLILIRNKAAHNQFPCAAEMPLIYRDVSAKVGSIEGSSAKDLPE |
| | | GSSLVDSLWKKYEMIIRKILPILDPENRFFGKLLNNMSQPINDL |
| Porphyromonas | WP_021665475 | MNTVPASENKGQSRTVEDDPQYFGLYLNLARENLIEVESHVRIK |
| gingivalis | | FGKKKLNEESLKQSLLCDHLLSVDRWTKVYGHSRRYLPFLHYF |
| (SEQ ID | | DPDSQIEKDHDSKTGVDPDSAQRLIRELYSLLDFLRNDFSHNRL |
| No. 160) | | DGTTFEHLEVSPDISSFITGTYSLACGRAQSRFADFFKPDDFVLA |
| | | KNRKEQLISVADGKECLTVSGLAFFICLFLDREQASGMLSRIRGF |
| | | KRTNENWARAVHETFCDLCIRHPHDRLESSNTKEALLLDMLNE |
| | | LNRCPRILYDMLPEEERAQFLPALDENSMNNLSENSLNEESRLL |
| | | WDGSSDWAEALTKRIRHQDRFPYLMLRFIEEMDLLKGIRFRVD |
| | | LGEIELDSYSKKVGRNGEYDRTITDHALAFGKLSDFQNEEEVSR |
| | | MISGEASYPVRFSLFAPRYAIYDNKIGYCHTSDPVYPKSKTGEK |
| | | RALSNPQSMGFISVHDLRKLLLMELLCEGSFSRMQSGFLRKANR |
| | | ILDETAEGKLQFSALFPEMRHRFIPPQNPKSKDRREKAETTLEKY |
| | | KQEIKGRKDKLNSQLLSAFDMNQRQLPSRLLDEWMNIRPASHS |
| | | VKLRTYVKQLNEDCRLRLRKFRKDGDGKARAIPLVGEMATFLS |
| | | QDIVRMIISEETKKLITSAYYNEMQRSLAQYAGEENRRQFRAIV |
| | | AELHLLDPSSGHPFLSATMETAHRYTEDFYKCYLEKKREWLAK |
| | | TFYRPEQDENTKRRISVFFVPDGEARKLLPLLIRRRMKEQNDLQ |
| | | DWIRNKQAHPIDLPSHLFDSKIMELLKVKDGKKKWNEAFKDW |
| | | WSTKYPDGMQPFYGLRRELNIHGKSVSYIPSDGKKFADCYTHL |
| | | MEKTVQDKKRELRTAGKPVPPDLAADIKRSFHRAVNEREFMLR |
| | | LVQEDDRLMLMAINKMMTDREEDILPGLKNIDSILDKENQFSLA |
| | | VHAKVLEKEGEGGDNSLSLVPATIEIKSKRKDWSKYIRYRYDR |
| | | RVPGLMSHFPEHKATLDEVKTLLGEYDRCRIKIFDWAFALEGAI |
| | | MSDRDLKPYLHESSSREGKSGEHSTLVKMLVEKKGCLTPDESQ |
| | | YLILIRNKAAHNQFPCAAEMPLIYRDVSAKVGSIEGSSAKDLPE |
| | | GSSLVDSLWKKYEMIIRKILPILDHENRFFGKLLNNMSQPINDL |
| Porphyromonas | WP_021677657 | MNTVPASENKGQSRTVEDDPQYFGLYLNLARENLIEVESHVRIK |
| gingivalis | | FGKKKLNEESLKQSLLCDHLLSVDRWTKVYGHSRRYLPFLHYF |
| (SEQ ID | | DPDSQIEKDHDSKTGVDPDSAQRLIRELYSLLDFLRNDFSHNRL |
| No. 161) | | DGTTFEHLEVSPDISSFITGTYSLACGRAQSRFADFFKPDDFVLA |
| | | KNRKEQLISVADGKECLTVSGLAFFICLFLDREQASGMLSRIRGF |
| | | KRTDENWARAVHETFCDLCIRHPHDRLESSNTKEALLLDMLNE |
| | | LNRCPRILYDMLPEEERAQFLPALDENSMNNLSENSLNEESRLL |
| | | WDGSSDWAEALTKRIRHQDRFPYLMLRFIEEMDLLKGIRFRVD |
| | | LGEIELDSYSKKVGRNGEYDRTITDHALAFGKLSDFQNEEEVSR |
| | | MISGEASYPVRFSLFAPRYAIYDNKIGYCHTSDPVYPKSKTGEK |
| | | RALSNPQSMGFISVHDLRKLLLMELLCEGSFSRMQSGFLRKANR |
| | | ILDETAEGKLQFSALFPEMRHRFIPPQNPKSKDRREKAETTLEKY |
| | | KQEIKGRKDKLNSQLLSAFDMNQRQLPSRLLDEWMNIRPASHS |
| | | VKLRTYVKQLNEDCRLRLRKFRKDGDGKARAIPLVGEMATFLS |
| | | QDIVRMIISEETKKLITSAYYNEMQRSLAQYAGEENRRQFRAIV |
| | | AELHLLDPSSGHPFLSATMETAHRYTEDFYKCYLEKKREWLAK |
| | | TFYRPEQDENTKRRISVFFVPDGEARKLLPLLIRRRMKEQNDLQ |
| | | DWIRNKQAHPIDLPSHLFDSKIMELLKVKDGKKKWNEAFKDW |
| | | WSTKYPDGMQPFYGLRRELNIHGKSVSYIPSDGKKFADCYTHL |
| | | MEKTVQDKKRELRTAGKPVPPDLAADIKRSFHRAVNEREFMLR |
| | | LVQEDDRLMLMAINKMMTDREEDILPGLKNIDSILDEENQFSLA |
| | | VHAKVLEKEGEGGDNSLSLVPATIEIKSKRKDWSKYIRYRYDR |
| | | RVPGLMSHFPEHKATLDEVKTLLGEYDRCRIKIFDWAFALEGAI |
| | | MSDRDLKPYLHESSSREGKSGEHSTLVKMLVEKKGCLTPDESQ |
| | | YLILIRNKAAHNQFPCAAEMPLIYRDVSAKVGSIEGSSAKDLPE |
| | | GSSLVDSLWKKYEMIIRKILPILDHENRFFGKLLNNMSQPINDL |
| Porphyromonas | WP_021680012 | MNTVPASENKGQSRTVEDDPQYFGLYLNLARENLIEVESHVRIK |
| gingivalis | | FGKKKLNEESLKQSLLCDHLLSVDRWTKVYGHSRRYLPFLHYF |
| (SEQ ID | | DPDSQIEKDHDSKTGVDPDSAQRLIRELYSLLDFLRNDFSHNRL |
| No. 162) | | DGTTFEHLEVSPDISSFITGTYSLACGRAQSRFADFFKPDDFVLA |
| | | KNRKEQLISVADGKECLTVSGLAFFICLFLDREQASGMLSRIRGF |
| | | KRTDENWARAVHETFCDLCIRHPHDRLESSNTKEALLLDMLNE |
| | | LNRCPRILYDMLPEEERAQFLPALDENSMNNLSENSLNEESRLL |
| | | WDGSSDWAEALTKRIRHQDRFPYLMLRFIEEMDLLKGIRFRVD |
| | | LGEIELDSYSKKVGRNGEYDRTITDHALAFGKLSDFQNEEEVSR |
| | | MISGEASYPVRFSLFAPRYAIYDNKIGYCHTSDPVYPKSKTGEK |
| | | RALSNPRSMGFISVHDLRKLLLMELLCEGSFSRMQSDFLRKANR |
| | | ILDETAEGKLQFSALFPEMRHRFIPPQNPKSKDRREKAETTLEKY |
| | | KQEIKGRKDKLNSQLLSAFDMDQRQLPSRLLDEWMNIRPASHS |
| | | VKLRTYVKQLNEDCRLRLQKFRKDGDGKARAIPLVGEMATFLS |
| | | QDIVRMIISEETKKLITSAYYNEMQRSLAQYAGEENRHQFRAIV |
| | | AELRLLDPSSGHPFLSATMETAHRYTEDFYKCYLEKKREWLAK |
| | | TFYRPEQDENTKRRISVFFVPDGEARKLLPLLIRRRMKEQNDLQ |
| | | DWIRNKQAHPIDLPSHLFDSKVMELLKVKDGKKKWNEAFKDW |
| | | WSTKYPDGMQPFYGLRRELNIHGKSVSYIPSDGKKFADCYTHL |
| | | MEKTVRDKKRELRTAGKPVPPDLAAYIKRSFHRAVNEREFMLR |
| | | LVQEDDRLMLMAINKIMTDREEDILPGLKNIDSILDKENQFSLA |
| | | VHAKVLEKEGEGGDNSLSLVPATIEIKSKRKDWSKYIRYRYDR |
| | | RVPGLMSHFPEHKATLDEVKTLLGEYDRCRIKIFDWAFALEGAI |
| | | MSDRDLKPYLHESSSREGKSGEHSTLVKMLVEKKGCLTPDESQ |
| | | YLILIRNKAAHNQFPCAAEIPLIYRDVSAKVGSIEGSSAKDLPEG |
| | | SSLVDSLWKKYEMIIRKILPILDPENRFFGKLLNNMSQPINDL |
| Porphyromonas | WP_023846767 | MNTVPASENKGQSRTVEDDPQYFGLYLNLARENLIEVESHVRIK |
| gingivalis | | FGKKKLNEESLKQSLLCDHLLSVDRWTKVYGHSRRYLPFLHYF |
| (SEQ ID | | DPDSQIEKDHDSKTGVDPDSAQRLIRELYSLLDFLRNDFSHNRL |
| No. 163) | | DGTTFEHLEVSPDISSFITGTYSLACGRAQSRFADFFKPDDFVLA |
| | | KNRKEQLISVADGKECLTVSGLAFFICLFLDREQASGMLSRIRGF |
| | | KRTDENWARAVHETFCDLCIRHPHDRLESSNTKEALLLDMLNE |
| | | LNRCPRILYDMLPEEERAQFLPALDENSMNNLSENSLNEESRLL |
| | | WDGSSDWAEALTKRIRHQDRFPYLMLRFIEEMDLLKGIRFRVD |
| | | LGEIELDSYSKKVGRNGEYDRTITDHALAFGKLSDFQNEEEVSR |
| | | MISGEASYPVRFSLFAPRYAIYDNKIGYCHTSDPVYPKSKTGEK |
| | | RALSNPRSMGFISVHDLRKLLLMELLCEGSFSRMQSDFLRKANR |
| | | ILDETAEGKLQFSALFPEMRHRFIPPQNPKSKDRREKAETTLEKY |
| | | KQEIKGRKDKLNSQLLSAFDMNQRQLPSRLLDEWMNIRPASHS |
| | | VKLRTYVKQLNEDCRLRLRKFRKDGDGKARAIPLVGEMATFLS |
| | | QDIVRMIISEETKKLITSAYYNEMQRSLAQYAGEENRRQFRAIV |
| | | AELHLLDPSSGHPFLSATMETAHRYTEDFYKCYLEKKREWLAK |
| | | TFYRPEQDENTKRRISVFFVPDGEARKLLPLLIRRRMKEQNDLQ |
| | | DWIRNKQAHPIDLPSHLFDSKIMELLKVKDGKKKWNEAFKDW |
| | | WSTKYPDGMQPFYGLRRELNIHGKSVSYIPSDGKKFADCYTHL |
| | | MEKTVQDKKRELRTAGKPVPPDLAADIKRSFHRAVNEREFMLR |
| | | LVQEDDRLMLMAINKMMTDREEDILPGLKNIDSILDEENQFSLA |
| | | VHAKVLEKEGEGGDNSLSLVPATIEIKSKRKDWSKYIRYRYDR |
| | | RVPGLMSHFPEHKATLDEVKTLLGEYDRCRIKIFDWAFALEGAI |
| | | MSDRDLKPYLHESSSREGKSGEHSTLVKMLVEKKGCLTPDESQ |
| | | YLILIRNKAAHNQFPCAAEMPLIYRDVSAKVGSIEGSSAKDLPE |
| | | GSSLVDSLWKKYEMIIRKILPILDPENRFFGKLLNNMSQPINDL |
| Prevotella | WP_036884929 | MKNDNNSTKSTDYTLGDKHFWAAFLNLARHNVYITVNHINKV |
| falsenii | | LELKNKKDQEIIIDNDQDILAIKTLWGKVDTDINKKDRLRELIM |
| (SEQ ID | | KHFPFLEAATYQQSSTNNTKQKEEEQAKAQSFESLKDCLFLFLE |
| No. 164) | | KLREARNYYSHYKHSKSLEEPKLEEKLLENMYNIFDTNVQLVIK |
| | | DYEHNKDINPEEDFKHLGRAEGEFNYYFTRNKKGNITESGLLFF |
| | | VSLFLEKKDAIWAQTKIKGFKDNRENKQKMTHEVFCRSRMLLP |
| | | KLRLESTQTQDWILLDMLNELIRCPKSLYKRLQGEKREKFRVPF |
| | | DPADEDYDAEQEPFKNTLVRHQDRFPYFALRYFDYNEIFTNLRF |
| | | QIDLGTYHFSIYKKQIGDKKEDRHLTHKLYGFERIQEFAKENRP |
| | | DEWKALVKDLDTFEESNEPYISETTPHYHLENQKIGIRNKNKKK |
| | | KKTIWPSLETKTTVNERSKYNLGKSFKAEAFLSVHELLPMMFY |
| | | YLLLNKEEPNNGKINASKVEGIIEKKIRDIYKLYGAFANEEINNE |
| | | EELKEYCEGKDIAIRHLPKQMIAILKNEYKDMAKKAEDKQKKM |
| | | IKDTKKRLAALDKQVKGEVEDGGRNIKPLKSGRIASWLVNDM |
| | | MRFQPVQRDRDGYPLNNSKANSTEYQLLQRTLALFGSERERLA |
| | | PYFRQMNLIGKDNPHPFLKDTKWKEHNNILSFYRSYLEAKKNF |
| | | LGSLKPEDWKKNQYFLKLKEPKTNRETLVQGWKNGFNLPRGIF |
| | | TEPIREWFIRHQNESEEYKKVKDFDRIGLVAKVIPLFFKEDYQKE |
| | | IEDYVQPFYGYPFNVGNIHNSQEGTFLNKKEREELWKGNKTKF |
| | | KDYKTKEKNKEKTNKDKFKKKTDEEKEEFRSYLDFQSWKKFE |
| | | RELRLVRNQDIVTWLLCMELIDKLKIDELNIEELQKLRLKDIDTD |
| | | TAKKEKNNILNRIMPMELPVTVYETDDSNNIIKDKPLHTIYIKEA |
| | | ETKLLKQGNFKALVKDRRLNGLFSFVETSSEAELKSKPISKSLVE |
| | | YELGEYQRARVEIIKDMLRLEETLIGNDEKLPTNKFRQMLDKW |
| | | LEHKKETDDTDLKNDVKLLTEVRNAFSHNQYPMRDRIAFANIK |
| | | PFSLSSANTSNEEGLGIAKKLKDKTKETIDRIIEIEEQTATKR |
| Prevotella | WP_036931485 | MENDKRLEESTCYTLNDKHFWAAFLNLARHNVYITINHINKLL |
| pleuritidis | | EIRQIDNDEKVLDIKALWQKVDKDINQKARLRELMIKHFPFLEA |
| (SEQ ID | | AIYSNNKEDKEEVKEEKQAKAQSFKSLKDCLFLFLEKLQEARN |
| No. 165) | | YYSHYKSSESSKEPEFEEGLLEKMYNTFGVSIRLVKEDYQYNKD |
| | | IDPEKDFKHLERKEDFNYLFTDKDNKGKITKNGLLFFVSLFLEK |
| | | KDAIWMQQKLRGFKDNRGNKEKMTHEVFCRSRMLLPKIRLES |
| | | TQTQDWILLDMLNELIRCPKSLYERLQGAYREKFKVPFDSIDED |
| | | YDAEQEPFRNTLVRHQDRFPYFALRYFDYNEIFKNLRFQIDLGT |
| | | YHFSIYKKLIGDNKEDRHLTHKLYGFERIQEFAKQKRPNEWQA |
| | | LVKDLDIYETSNEQYISETTPHYHLENQKIGIRFKNKKDKIWPSL |
| | | ETNGKENEKSKYNLDKSFQAEAFLSIHELLPMMFYDLLLKKEEP |
| | | NNDEKNASIVEGFIKKEIKRMYAIYDAFANEEINSKEGLEEYCK |
| | | NKGFQERHLPKQMIAILTNKSKNMAEKAKRKQKEMIKDTKKR |
| | | LATLDKQVKGEIEDGGRNIRLLKSGEIARWLVNDMMRFQSVQK |
| | | DKEGKPLNNSKANSTEYQMLQRSLALYNKEQKPTPYFIQVNLI |
| | | KSSNPHPFLEETKWEECNNILSFYRSYLEAKKNFLESLKPEDWK |
| | | KNQYFLMLKEPKTNRKTLVQGWKNGFNLPRGIFTEPIKEWFKR |
| | | HQNDSEEYKKVEALDRVGLVAKVIPLFFKEEYFKEDAQKEINN |
| | | CVQPFYSFPYNVGNIHKPEEKNFLHCEERRKLWDKKKDKFKGY |
| | | KAKEKSKKMTDKEKEEHRSYLEFQSWNKFERELRLVRNQDIVT |
| | | WLLCTELIDKLKIDELNIEELQKLRLKDIDTDTAKKEKNNILNRI |
| | | MPMQLPVTVYEIDKSFNIVKDKPLHTIYIEETGTKLLKQGNFKA |
| | | LVKDRRLNGLFSFVKTSSEAESKSKPISKLRVEYELGAYQKARI |
| | | DIIKDMLALEKTLIDNDENLPTNKFSDMLKSWLKGKGEANKAR |
| | | LQNDVDLLVAIRNAFSHNQYPMYNSEVFKGMKLLSLSSDIPEKE |
| | | GLGIAKQLKDKIKETIERIIEIEKEIRN |
| [Porphyromonas | WP_039417390 | MTEQNERPYNGTYYTLEDKHFWAAFFNLARHNAYITLAHIDRQ |
| gingivalis | | LAYSKADITNDEDILFFKGQWKNLDNDLERKARLRSLILKHFSF |
| (SEQ ID | | LEGAAYGKKLFESQSSGNKSSKKKELTKKEKEELQANALSLDN |
| No. 166) | | LKSILFDFLQKLKDFRNYYSHYRHPESSELPLFDGNMLQRLYNV |
| | | FDVSVQRVKRDHEHNDKVDPHRHFNHLVRKGKKDRYGNNDN |
| | | PFFKHHFVDREGTVTEAGLLFFVSLFLEKRDAIWMQKKIRGFKG |
| | | GTEAYQQMTNEVFCRSRISLPKLKLESLRTDDWMLLDMLNELV |
| | | RCPKSLYDRLREEDRARFRVPIDILSDEDDTDGTEEDPFKNTLVR |
| | | HQDRFPYFALRYFDLKKVFTSLRFHIDLGTYHFAIYKKNIGEQPE |
| | | DRHLTRNLYGFGRIQDFAEEHRPEEWKRLVRDLDYFETGDKPY |
| | | ITQTTPHYHIEKGKIGLRFVPEGQHLWPSPEVGATRTGRSKYAQ |
| | | DKRLTAEAFLSVHELMPMMFYYFLLREKYSEEVSAEKVQGRIK |
| | | RVIEDVYAVYDAFARGEIDTLDRLDACLADKGIRRGHLPRQMI |
| | | AILSQEHKDMEEKVRKKLQEMIADTDHRLDMLDRQTDRKIRIG |
| | | RKNAGLPKSGVIADWLVRDMMRFQPVAKDTSGKPLNNSKANS |
| | | TEYRMLQRALALFGGEKERLTPYFRQMNLTGGNNPHPFLHETR |
| | | WESHTNILSFYRSYLKARKAFLQSIGRSDREENHRFLLLKEPKT |
| | | DRQTLVAGWKSEFHLPRGIFTEAVRDCLIEMGYDEVGSYKEVG |
| | | FMAKAVPLYFERACKDRVQPFYDYPFNVGNSLKPKKGRFLSKE |
| | | KRAEEWESGKERFRLAKLKKEILEAKEHPYLDFKSWQKFEREL |
| | | RLVKNQDIITWMMCRDLMEENKVEGLDTGTLYLKDIRTDVHE |
| | | QGSLNVLNRVKPMRLPVVVYRADSRGHVHKEQAPLATVYIEE |
| | | RDTKLLKQGNFKSFVKDRRLNGLFSFVDTGALAMEQYPISKLR |
| | | VEYELAKYQTARVCAFEQTLELEESLLTRYPHLPDKNFRKMLE |
| | | SWSDPLLDKWPDLHRKVRLLIAVRNAFSHNQYPMYDEAVFSSI |
| | | RKYDPSSPDAIEERMGLNIAHRLSEEVKQAKEMAERIIQV |
| Porphyromonas | WP_094189123 | MTEQSERPYNGTYYTLEDKHFWAAFLNLARHNAYITLTHIDRQ |
| gulae | | LAYSKADITNDQDVLSFKALWKNLDNDLERKSRLRSLILKHFSF |
| (SEQ ID | | LEGAAYGKKLFESKSSGNKSSKNKELTKKEKEELQANALSLDN |
| No. 167) | | LKSILFDFLQKLKDFRNYYSHYRHSGSSELPLFDGNMLQRLYNV |
| | | FDVSVQRVKRDHEHNDKVDPHRHFNHLVRKGKKDRYGHNDN |
| | | PSFKHHFVDSEGMVTEAGLLFFVSLFLEKRDAIWMQKKIRGFK |
| | | GGTETYQQMTNEVFCRSRISLPKLKLESLRMDDWMLLDMLNE |
| | | LVRCPKPLYDRLREDDRACFRVPVDILPDEDDTDGGGEDPFKN |
| | | TLVRHQDRFPYFALRYFDLKKVFTSLRFHIDLGTYHFAIYKKMI |
| | | GEQPEDRHLTRNLYGFGRIQDFAEEHRPEEWKRLVRDLDYFET |
| | | GDKPYISQTSPHYHIEKGKIGLRFMPEGQHLWPSPEVGTTRTGR |
| | | SKYAQDKRLTAEAFLSVHELMPMMFYYFLLREKYSEEVSAEKV |
| | | QGRIKRVIEDVYAIYDAFARDEINTLKELDACLADKGIRRGHLP |
| | | KQMIAILSQEHKNMEEKVRKKLQEMIADTDHRLDMLDRQTDR |
| | | KIRIGRKNAGLPKSGVIADWLVRDMMRFQPVAKDASGKPLNNS |
| | | KANSTEYRMLQRALALFGGEKERLTPYFRQMNLTGGNNPHPFL |
| | | HDTRWESHTNILSFYRSYLRARKAFLERIGRSDRMENRPFLLLK |
| | | EPKTDRQTLVAGWKSEFHLPRGIFTEAVRDCLIEMGYDEVGSY |
| | | REVGFMAKAVPLYFERACEDRVQPFYDSPFNVGNSLKPKKGRF |
| | | LSKEERAEEWERGKERFRDLEAWSHSAARRIEDAFAGIEYASPG |
| | | NKKKIEQLLRDLSLWEAFESKLKVRADKINLAKLKKEILEAQEH |
| | | PYHDFKSWQKFERELRLVKNQDIITWMMCRDLMEENKVEGLD |
| | | TGTLYLKDIRTNVQEQGSLNVLNHVKPMRLPVVVYRADSRGH |
| | | VHKEEAPLATVYIEERDTKLLKQGNFKSFVKDRRLNGLFSFVDT |
| | | GGLAMEQYPISKLRVEYELAKYQTARVCAFEQTLELEESLLTRY |
| | | PHLPDKNFRKMLESWSDPLLAKWPELHGKVRLLIAVRNAFSHN |
| | | QYPMYDEAVFSSIRKYDPSSPDAIEERMGLNIAHRLSEEVKQAK |
| | | ETVERIIQA |
| Porphyromonas | WP_039419792 | MTEQSERPYNGTYYTLEDKHFWAAFLNLARHNAYITLTHIDRQ |
| gulae | | LAYSKADITNDQDVLSFKALWKNLDNDLERKSRLRSLILKHFSF |
| (SEQ ID | | LEGAAYGKKLFESKSSGNKSSKNKELTKKEKEELQANALSLDN |
| No. 168) | | LKSILFDFLQKLKDFRNYYSHYRHSGSSELPLFDGNMLQRLYNV |
| | | FDVSVQRVKRDHEHNDKVDPHRHFNHLVRKGKKDRYGHNDN |
| | | PSFKHHFVDGEGMVTEAGLLFFVSLFLEKRDAIWMQKKIRGFK |
| | | GGTETYQQMTNEVFCRSRISLPKLKLESLRTDDWMLLDMLNEL |
| | | VRCPKPLYDRLREKDRARFRVPVDILPDEDDTDGGGEDPFKNT |
| | | LVRHQDRFPYFALRYFDLKKVFTSLRFHIDLGTYHFAIYKKVIG |
| | | EQPEDRHLTRNLYGFGRIQDFAEEHRPEEWKRLVRDLDYFETG |
| | | DKPYISQTTPHYHIEKGKIGLRFVPEGQHLWPSPEVGTTRTGRSK |
| | | YAQDKRLTAEAFLSVHELMPMMFYYFLLREKYSEEVSAEKVQ |
| | | GRIKRVIEDVYAIYDAFARDEINTRDELDACLADKGIRRGHLPK |
| | | QMIGILSQEHKNMEEKVRKKLQEMIADTDHRLDMLDRQTDRKI |
| | | RIGRKNAGLPKSGVIADWLVRDMMRFQPVAKDTSGKPLNNSK |
| | | ANSTEYRMLQRALALFGGEKERLTPYFRQMNLTGGNNPHPFLD |
| | | ETRWESHTNILSFYRSYLRARKAFLERIGRSDRVENRPFLLLKEP |
| | | KTDRQTLVAGWKSEFHLPRGIFTEAVRDCLIEMGYDEVGSYKE |
| | | VGFMAKAVPLYFERACKDRVQPFYDSPFNVGNSLKPKKGRFLS |
| | | KEKRAEEWESGKERFRLAKLKKEILEAQEHPYHDFKSWQKFER |
| | | ELRLVKNQDIITWMMCRDLMEENKVEGLDTGTLYLKDIRPNVQ |
| | | EQGSLNVLNRVKPMRLPVVVYRADSRGHVHKEEAPLATVYIEE |
| | | RDTKLLKQGNFKSFVKDRRLNGLFSFVDTGGLAMEQYPISKLR |
| | | VEYELAKYQTARVCVFELTLRLEESLLSRYPHLPDESFREMLES |
| | | WSDPLLAKWPELHGKVRLLIAVRNAFSHNQYPMYDEAVFSSIR |
| | | KYDPSSPDAIEERMGLNIAHRLSEEVKQAKETVERIIQA |
| Porphyromonas | WP_039426176 | MTEQSERPYNGTYYTLEDKHFWAAFLNLARHNAYITLTHIDRQ |
| gulae | | LAYSKADITNDQDVLSFKALWKNFDNDLERKSRLRSLILKHFSF |
| (SEQ ID | | LEGAAYGKKLFESKSSGNKSSKNKELTKKEKEELQANALSLDN |
| No. 169) | | LKSILFDFLQKLKDFRNYYSHYRHSGSSELPLFDGNMLQRLYNV |
| | | FDVSVQRVKRDHEHNDKVDPHYHFNHLVRKGKKDRYGHNDN |
| | | PSFKHHFVDSEGMVTEAGLLFFVSLFLEKRDAIWMQKKIRGFK |
| | | GGTGPYEQMTNEVFCRSRISLPKLKLESLRTDDWMLLDMLNEL |
| | | VRCPKPLYDRLREKDRACFRVPVDILPDEDDTDGGGEDPFKNT |
| | | LVRHQDRFPYFALRYFDLKKVFTSLRFHIDLGTYHFAIYKKMIG |
| | | EQPEDRHLTRNLYGFGRIQDFAEEHRPEEWKRLVRDLDYFETG |
| | | DKPYISQTTPHYHIEKGKIGLRFMPEGQHLWPSPEVGTTRTGRS |
| | | KYAQDKRLTAEAFLSVHELMPMMFYYFLLREKYSEEVSAEKV |
| | | QGRIKRVIKDVYAIYDAFARDEINTLKELDACSADKGIRRGHLP |
| | | KQMIGILSQEHKNMEEKVRKKLQEMIADTDHRLDMLDRQTDR |
| | | KIRIGRKNAGLPKSGVIADWLVRDMMRFQPVAKDTSGKPLNNS |
| | | KANSTEYRMLQRALALFGGEKERLTPYFRQMNLTGGNNPHPFL |
| | | DETRWESHTNILSFYRSYLRARKAFLERIGRSDRVENRPFLLLKE |
| | | PKNDRQTLVAGWKSEFHLPRGIFTEAVRDCLIEMGYDEVGSYK |
| | | EVGFMAKAVPLYFERACKDRVQPFYDSPFNVGNSLKPKKGRFL |
| | | SKEKRAEEWESGKERFRLAKLKKEILEAKEHPYHDFKSWQKFE |
| | | RELRLVKNQDIITWMMCRDLMEENKVEGLDTGTLYLKDIRTDV |
| | | HEQGSLNVLNRVKPMRLPVVVYRADSRGHVHKEQAPLATVYI |
| | | EERDTKLLKQGNFKSFVKDRRLNGLFSFVDTGGLAMEQYPISK |
| | | LRVEYELAKYQTARVCAFEQTLELEESLLTRYPHLPDENFREML |
| | | ESWSDPLLGKWPDLHGKVRLLIAVRNAFSHNQYPMYDEAVFSS |
| | | IRKYDPSSPDAIEERMGLNIAHRLSEEVKQAKETVERIIQA |
| Porphyromonas | WP_039431778 | MTEQSERPYNGTYYTLEDKHFWAAFLNLARHNAYITLTHIDRQ |
| gulae | | LAYSKADITNDQDVLSFKALWKNFDNDLERKSRLRSLILKHFSF |
| (SEQ ID | | LEGAAYGKKLFESKSSGNKSSKNKELTKKEKEELQANALSLDN |
| No. 170) | | LKSILFDFLQKLKDFRNYYSHYRHSESSELPLFDGNMLQRLYNV |
| | | FDVSVQRVKRDHEHNDKVDPHRHFNHLVRKGKKDRYGHNDN |
| | | PSFKHHFVDGEGMVTEAGLLFFVSLFLEKRDAIWMQKKIRGFK |
| | | GGTETYQQMTNEVFCRSRISLPKLKLESLRTDDWMLLDMLNEL |
| | | VRCPKPLYDRLREDDRACFRVPVDILPDEDDTDGGGEDPFKNT |
| | | LVRHQDRFPYFALRYFDLKKVFTSLRFHIDLGTYHFAIYKKMIG |
| | | EQPEDRHLTRNLYGFGRIQDFAEEHRPEEWKRLVRDLDYFETG |
| | | DKPYISQTSPHYHIEKGKIGLRFMPEGQHLWPSPEVGTTRTGRS |
| | | KYAQDKRLTAEAFLSVHELMPMMFYYFLLREKYSEEVSAEKV |
| | | QGRIKRVIEDVYAIYDAFARDEINTLKELDACLADKGIRRGHLP |
| | | KQMIAILSQEHKDMEEKIRKKLQEMIADTDHRLDMLDRQTDRK |
| | | IRIGRKNAGLPKSGVIADWLVRDMMRFQPVAKDTSGKPLNNSK |
| | | ANSTEYRMLQRALALFGGEKKRLTPYFRQMNLTGGNNPHPFLH |
| | | ETRWESHTNILSFYRSYLRARKAFLERIGRSDRMENRPFLLLKEP |
| | | KTDRQTLVAGWKSEFHLPRGIFTEAVRDCLIEMGYDEVGSYRE |
| | | VGFMAKAVPLYFERACEDRVQPFYDSPFNVGNSLKPKKGRFLS |
| | | KEERAEEWERGKERFRDLEAWSHSAARRIEDAFAGIEYASPGN |
| | | KKKIEQLLRDLSLWEAFESKLKVRADKINLAKLKKEILEAQEHP |
| | | YHDFKSWQKFERELRLVKNQDIITWMMCRDLMEENKVEGLDT |
| | | GTLYLKDIRPNVQEQGSLNVLNRVKPMRLPVVVYRADSRGHV |
| | | HKEEAPLATVYIEERDTKLLKQGNFKSFVKDRRLNGLFSFVDTG |
| | | GLAMEQYPISKLRVEYELAKYQTARVCVFELTLRLEESLLTRYP |
| | | HLPDESFRKMLESWSDPLLAKWPELHGKVRLLIAVRNAFSHNQ |
| | | YPMYDEAVFSSIRKYDPSSPDAIEERMGLNIAHRLSEEVKQAKE |
| | | TVERIIQV |
| Porphyromonas | WP_039437199 | MTEQSERPYNGTYYTLEDKHFWAAFLNLARHNAYITLTHIDRQ |
| gulae | | LAYSKADITNDEDILFFKGQWKNLDNDLERKSRLRSLILKHFSF |
| (SEQ ID | | LEGAAYGKKFFESKSSGNKSSKNKELTKKEKEELQANALSLDN |
| No. 171) | | LKSILFDFLQKLKDFRNYYSHYRHSGSSELPLFDGNMLQRLYNV |
| | | FDVSVQRVKRDHEHNDEVDPHYHFNHLVRKGKKDRYGHNDN |
| | | PSFKHHFVDGEGMVTEAGLLFFVSLFLEKRDAIWMQKKIRGFK |
| | | GGTEPYEQMTNEVFCRSRISLPKLKLESLRTDDWMLLDMLNEL |
| | | VRCPKPLYDRLREKDRACFRVPVDILPDEDDTDGGGEDPFKNT |
| | | LVRHQDRFPYFALRYFDLKKVFTSLRFHIDLGTYHFAIYKKMIG |
| | | EQPEDRHLTRNLYGFGRIQDFAEEHRPEEWKRLVRDLDYFETG |
| | | DKPYISQTTPHYHIEKGKIGLRFVPEGQHLWPSPEVGTTRTGRSK |
| | | YAQDKRLTAEAFLSVHELMPMMFYYFLLREKYSEEVSAEKVQ |
| | | GRIKRVIEDVYAIYDAFARDEINTLKELDACLADKGIRRGHLPK |
| | | QMIGILSQERKDMEEKVRKKLQEMIADTDHRLDMLDRQTDRKI |
| | | RIGRKNAGLPKSGVIADWLVRDMMRFQPVAKDTSGKPLNNSK |
| | | ANSTEYRMLQRALALFGGEKERLTPYFRQMNLTGGNNPHPFLH |
| | | ETRWESHTNILSFYRSYLRARKAFLERIGRSDRVENCPFLLLKEP |
| | | KTDRQTLVAGWKGEFHLPRGIFTEAVRDCLIEMGYDEVGSYRE |
| | | VGFMAKAVPLYFERACEDRVQPFYDSPFNVGNSLKPKKGRFLS |
| | | KEKRAEEWESGKERFRLAKLKKEILEAQEHPYHDFKSWQKFER |
| | | ELRLVKNQDIITWMMCRDLMEENKVEGLDTGTLYLKDIRPNVQ |
| | | EQGSLNVLNRVKPMRLPVVVYRADSRGHVHKEEAPLATVYIEE |
| | | RDTKLLKQGNFKSFVKDRRLNGLFSFVDTGALAMEQYPISKLR |
| | | VEYELAKYQTARVCAFEQTLELEESLLTRYPHLPDESFREMLES |
| | | WSDPLLTKWPELHGKVRLLIAVRNAFSHNQYPMYDEAVFSSIW |
| | | KYDPSSPDAIEERMGLNIAHRLSEEVKQAKETIERIIQA |
| Porphyromonas | WP_039442171 | MTEQSERPYNGTYYTLEDKHFWAAFLNLARHNAYITLTHIDRQ |
| gulae | | LAYSKADITNDQDVLSFKALWKNLDNDLERKSRLRSLILKHFSF |
| (SEQ ID | | LEGAAYGKKLFESKSSGNKSSKNKELTKKEKEELQANALSLDN |
| No. 172) | | LKSILFDFLQKLKDFRNYYSHYRHSGSSELPLFDGNMLQRLYNV |
| | | FDVSVQRVKRDHEHNDKVDPHYHFNHLVRKGKKDRYGHNDN |
| | | PSFKHHFVDSEGMVTEAGLLFFVSLFLEKRDAIWMQKKIRGFK |
| | | GGTGPYEQMTNEVFCRSRISLPKLKLESLRTDDWMLLDMLNEL |
| | | VRCPKPLYDRLREKDRACFRVPVDILPDEDDTDGGGEDPFKNT |
| | | LVRHQDRFPYFALRYFDLKKVFTSLRFHIDLGTYHFAIYKKMIG |
| | | EQPEDRHLTRNLYGFGRIQDFAEEHRPEEWKRLVRDLDYLETG |
| | | DKPYISQTTPHYHIEKGKIGLRFVPEGQHLWPSPEVGTTRTGRSK |
| | | CAQDKRLTAEAFLSVHELMPMMFYYFLLREKYSEEVSAEKVQ |
| | | GRIKRVIEDVYAIYDAFARDEINTLKELDTCLADKGIRRGHLPK |
| | | QMITILSQERKDMKEKIRKKLQEMIADTDHRLDMLDRQTDRKI |
| | | RIGRKNAGLPKSGVIADWLVRDMMRFQPVAKDASGKPLNNSK |
| | | ANSTEYRMLQRALALFGGEKERLTPYFRQMNLTGGNNPHPFLH |
| | | ETRWESHTNILSFYRSYLRARKAFLERIGRSDRVENCPFLLLKEP |
| | | KTDRQTLVAGWKDEFHLPRGIFTEAVRDCLIEMGYDEVGSYRE |
| | | VGFMAKAVPLYFERACEDRVQPFYDSPFNVGNSLKPKKGRFLS |
| | | KEDRAEEWERGMERFRDLEAWSHSAARRIKDAFAGIEYASPGN |
| | | KKKIEQLLRDLSLWEAFESKLKVRADKINLAKLKKEILEAQEHP |
| | | YHDFKSWQKFERELRLVKNQDIITWMMCRDLMEENKVEGLDT |
| | | GTLYLKDIRPNVQEQGSLNVLNRVKPMRLPVVVYRADSRGHV |
| | | HKEAPLATVYIEERNTKLLKQGNFKSFVKDRRLNGLFSFVDTG |
| | | GLAMEQYPISKLRVEYELAKYQTARVCVFELTLRLEESLLSRYP |
| | | HLPDESFREMLESWSDPLLAKWPELHGKVRLLIAVRNAFSHNQ |
| | | YPMYDEAVFSSIRKYDPSSPDAIEERMGLNIAHRLSEEVKQAKE |
| | | TVERIIQA |
| Porphyromonas | WP_039445055 | MNTVPATENKGQSRTVEDDPQYFGLYLNLARENLIEVESHVRI |
| gulae | | KFGKKKLNEESLKQSLLCDHLLSIDRWTKVYGHSRRYLPFLHCF |
| (SEQ ID | | DPDSGIEKDHDSKTGVDPDSAQRLIRELYSLLDFLRNDFSHNRL |
| No. 173) | | DGTTFEHLKVSPDISSFITGAYTFACERAQSRFADFFKPDDFLLA |
| | | KNRKEQLISVADGKECLTVSGFAFFICLFLDREQASGMLSRIRGF |
| | | KRTDENWARAVHETFCDLCIRHPHDRLESSNTKEALLLDMLNE |
| | | LNRCPRILYDMLPEEERAQFLPALDENSMNNLSENSLNEESRLL |
| | | WDGSSDWAEALTKRIRHQDRFPYLMLRFIEEMDLLKGIRFRVD |
| | | LGEIELDSYSKKVGRNGEYDRTITDHALAFGKLSDFQNEEEVSR |
| | | MISGEASYPVRFSLFAPRYAIYDNKIGYCHTSDPVYPKSKTGEK |
| | | RALSNPQSMGFISVHDLRKLLLMELLCEGSFSRMQSDFLRKANR |
| | | ILDETAEGKLQFSALFPEMRHRFIPPQNPKSKDRREKAETTLEKY |
| | | KQEIKGRKDKLNSQLLSAFDMNQRQLPSRLLDEWMNIRPASHS |
| | | VKLRTYVKQLNEDCRLRLRKFRKDGDGKARAIPLVGEMATFLS |
| | | QDIVRMIISEETKKLITSAYYNEMQRSLAQYAGEENRRQFRAIV |
| | | AELHLLDPSSGHPFLSATMETAHRYTEDFYKCYLEKKREWLAK |
| | | TFYRPEQDENTKRRISVFFVPDGEARKLLPLLIRRRMKEQNDLQ |
| | | DWIRNKQAHPIDLPSHLFDSKIMELLKVKDGKKKWNEAFKDW |
| | | WSTKYPDGMQPFYGLRRELNIHGKSVSYIPSDGKKFADCYTHL |
| | | MEKTVRDKKRELRTAGKPVPPDLAAYIKRSFHRAVNEREFMLR |
| | | LVQEDDRLMLMAINKMMTDREEDILPGLKNIDSILDEENQFSLA |
| | | VHAKVLEKEGEGGDNSLSLVPATIEIKSKRKDWSKYIRYRYDR |
| | | RVPGLMSHFPEHKATLDEVKTLLGEYDRCRIKIFDWAFALEGAI |
| | | MSDRDLKPYLHESSSREGKSGEHSTLVKMLVEKKGCLTPDESQ |
| | | YLILIRNKAAHNQFPCAAEMPLIYRDVSAKVGSIEGSSAKDLPE |
| | | GSSLVDSLWKKYEMIIRKILPILDHENRFFGKLLNNMSQPINDL |
| Capnocytophaga | WP_041989581 | MENKTSLGNNIYYNPFKPQDKSYFAGYLNAAMENIDSVFRELG |
| cynodegmi | | KRLKGKEYTSENFFDAIFKENISLVEYERYVKLLSDYFPMARLL |
| (SEQ ID | | DKKEVPIKERKENFKKNFRGIIKAVRDLRNFYTHKEHGEVEITD |
| No. 174) | | EIFGVLDEMLKSTVLTVKKKKIKTDKTKEILKKSIEKQLDILCQK |
| | | KLEYLKDTARKIEEKRRNQRERGEKKLVPRFEYSDRRDDLIAAI |
| | | YNDAFDVYIDKKKDSLKESSKTKYNTESYPQQEEGDLKIPISKN |
| | | GVVFLLSLFLSKQEVHAFKSKIAGFKATVIDEATVSHRKNSICF |
| | | MATHEIFSHLAYKKLKRKVRTAEINYSEAENAEQLSIYAKETLM |
| | | MQMLDELSKVPDVVYQNLSEDVQKTFIEDWNEYLKENNGDVG |
| | | TMEEEQVIHPVIRKRYEDKFNYFAIRFLDEFAQFPTLRFQVHLG |
| | | NYLHDSRPKEHLISDRRIKEKITVFGRLSELEHKKALFIKNTETN |
| | | EDRKHYWEVFPNPNYDFPKENISVNDKDFPIAGSILDREKQPTA |
| | | GKIGIKVNLLNQKYISEVDKAVKAHQLKQRNNKPSIQNIIEEIVPI |
| | | NGSNPKEIIVFGGQPTAYLSMNDIHSILYEFFDKWEKKKEKLEK |
| | | KGEKELRKEIGKELEEKIVGKIQTQIQQIIDKDINAKILKPYQDDD |
| | | STAIDKEKLIKDLKQEQKILQKLKNEQTAREKEYQECIAYQEES |
| | | RKIKRSDKSRQKYLRNQLKRKYPEVPTRKEILYYQEKGKVAVW |
| | | LANDIKRFMPTDFKNEWKGEQHSLLQKSLAYYEQCKEELKNLL |
| | | PQQKVFKHLPFELGGHFQQKYLYQFYTRYLDKRLEHISGLVQQ |
| | | AENFKNENKVFKKVENECFKFLKKQNYTHKGLDAQAQSVLGY |
| | | PIFLERGFMDEKPTIIKGKTFKGNESLFTDWFRYYKEYQNFQTF |
| | | YDTENYPLVELEKKQADRKRETKIYQQKKNDVFTLLMAKHIFK |
| | | SVFKQDSIDRFSLEDLYQSREERLENQEKAKQTGERNTNYIWNK |
| | | TVDLNLCDGKVTVENVKLKNVGNFIKYEYDQRVQTFLKYEENI |
| | | KWQAFLIKESKEEENYPYIVEREIEQYEKVRREELLKEVHLIEEY |
| | | ILEKVKDKEILKKGDNQNFKYYILNGLLKQLKNEDVESYKVFN |
| | | LNTKPEDVNINQLKQEATDLEQKAFVLTYIRNKFAHNQLPKKEF |
| | | WDYCQEKYGKIEKEKTYAEYFAEVFKREKEALMK |
| Prevotella | WP_042518169 | MNIPALVENQKKYFGTYSVMAMLNAQTVLDHIQKVADIEGEQ |
| sp. P5-119 | | NENNENLWFHPVMSHLYNAKNGYDKQPEKTMFIIERLQSYFPF |
| (SEQ ID | | LKIMAENQREYSNGKYKQNRVEVNSNDIFEVLKRAFGVLKMY |
| No. 175) | | RDLTNHYKTYEEKLIDGCEFLTSTEQPLSGMISKYYTVALRNTK |
| | | ERYGYKTEDLAFIQDNIKKITKDAYGKRKSQVNTGFFLSLQDYN |
| | | GDTQKKLHLSGVGIALLICLFLDKQYINIFLSRLPIFSSYNAQSEE |
| | | RRIIIRSFGINSIKLPKDRIHSEKSNKSVAMDMLNEVKRCPDELFT |
| | | TLSAEKQSRFRIISDDHNEVLMKRSTDRFVPLLLQYIDYGKLFD |
| | | HIRFHVNMGKLRYLLKADKTCIDGQTRVRVIEQPLNGFGRLEE |
| | | AETMRKQENGTFGNSGIRIRDFENVKRDDANPANYPYIVDTYT |
| | | HYILENNKVEMFISDKGSSAPLLPLIEDDRYVVKTIPSCRMSTLEI |
| | | PAMAFHMFLFGSKKTEKLIVDVHNRYKRLFQAMQKEEVTAENI |
| | | ASFGIAESDLPQKILDLISGNAHGKDVDAFIRLTVDDMLTDTER |
| | | RIKRFKDDRKSIRSADNKMGKRGFKQISTGKLADFLAKDIVLFQ |
| | | PSVNDGENKITGLNYRIMQSAIAVYDSGDDYEAKQQFKLMFEK |
| | | ARLIGKGTTEPHPFLYKVFARSIPANAVDFYERYLIERKFYLTGL |
| | | CNEIKRGNRVDVPFIRRDQNKWKTPAMKTLGRIYSEDLPVELPR |
| | | QMFDNEIKSHLKSLPQMEGIDFNNANVTYLIAEYMKRVLNDDF |
| | | QTFYQWKRNYHYMDMLKGEYDRKGSLQHCFTSVEEREGLWK |
| | | ERASRTERYRKLASNKIRSNRQMRNASSEEIETILDKRLSNCRNE |
| | | YQKSEKVIRRYRVQDALLFLLAKKTLTELADFDGERFKLKEIMP |
| | | DAEKGILSEIMPMSFTFEKGGKKYTITSEGMKLKNYGDFFVLAS |
| | | DKRIGNLLELVGSDIVSKEDIMEEFNKYDQCRPEISSIVFNLEKW |
| | | AFDTYPELSARVDREEKVDFKSILKILLNNKNINKEQSDILRKIR |
| | | NAFDHNNYPDKGIVEIKALPEIAMSIKKAFGEYAIMK |
| Prevotella | WP_044072147 | MNIPALVENQKKYFGTYSVMAMLNAQTVLDHIQKVADIEGEQ |
| sp. P4-76 | | NENNENLWFHPVMSHLYNAKNGYDKQPEKTMFIIERLQSYFPF |
| (SEQ ID | | LKIMAENQREYSNGKYKQNRVEVNSNDIFEVLKRAFGVLKMY |
| No. 176) | | RDQASHYKTYDEKLIDGCEFLTSTEQPLSGMINNYYTVALRNM |
| | | NERYGYKTEDLAFIQDKRFKFVKDAYGKKKSQVNTGFFLSLQD |
| | | YNGDTQKKLHLSGVGIALLICLFLDKQYINIFLSRLPIFSSYNAQS |
| | | EERRIIIRSFGINSIKQPKDRIHSEKSNKSVAMDMLNEIKRCPNEL |
| | | FETLSAEKQSRFRIISNDHNEVLMKRSSDRFVPLLLQYIDYGKLF |
| | | DHIRFHVNMGKLRYLLKADKTCIDGQTRVRVIEQPLNGFGRLE |
| | | EVETMRKQENGTFGNSGIRIRDFENMKRDDANPANYPYIVDTY |
| | | THYILENNKVEMFISDEETPAPLLPVIEDDRYVVKTIPSCRMSTL |
| | | EIPAMAFHMFLFGSKKTEKLIVDVHNRYKRLFKAMQKEEVTAE |
| | | NIASFGIAESDLPQKIIDLISGNAHGKDVDAFIRLTVDDMLADTE |
| | | RRIKRFKDDRKSIRSADNKMGKRGFKQISTGKLADFLAKDIVLF |
| | | QPSVNDGENKITGLNYRIMQSAIAVYNSGDDYEAKQQFKLMFE |
| | | KARLIGKGTTEPHPFLYKVFVRSIPANAVDFYERYLIERKFYLIG |
| | | LSNEIKKGNRVDVPFIRRDQNKWKTPAMKTLGRIYDEDLPVELP |
| | | RQMFDNEIKSHLKSLPQMEGIDFNNANVTYLIAEYMKRVLNDD |
| | | FQTFYQWKRNYRYMDMLRGEYDRKGSLQSCFTSVEEREGLWK |
| | | ERASRTERYRKLASNKIRSNRQMRNASSEEIETILDKRLSNSRNE |
| | | YQKSEKVIRRYRVQDALLFLLAKKTLTELADFDGERFKLKEIMP |
| | | DAEKGILSEIMPMSFTFEKGGKKYTITSEGMKLKNYGDFFVLAS |
| | | DKRIGNLLELVGSDTVSKEDIMEEFKKYDQCRPEISSIVFNLEKW |
| | | AFDTYPELSARVDREEKVDFKSILKILLNNKNINKEQSDILRKIR |
| | | NAFDHNNYPDKGVVEIRALPEIAMSIKKAFGEYAIMK |
| Prevotella | WP_044074780 | MNIPALVENQKKYFGTYSVMAMLNAQTVLDHIQKVADIEGEQ |
| sp. P5-60 | | NENNENLWFHPVMSHLYNAKNGYDKQPEKTMFIIERLQSYFPF |
| (SEQ ID | | LKIMAENQREYSNGKYKQNRVEVNSNDIFEVLKRAFGVLKMY |
| No. 177) | | RDLTNHYKTYEEKLIDGCEFLTSTEQPFSGMISKYYTVALRNTK |
| | | ERYGYKAEDLAFIQDNRYKFTKDAYGKRKSQVNTGSFLSLQDY |
| | | NGDTTKKLHLSGVGIALLICLFLDKQYINLFLSRLPIFSSYNAQSE |
| | | ERRIIIRSFGINSIKQPKDRIHSEKSNKSVAMDMLNEVKRCPDELF |
| | | TTLSAEKQSRFRIISDDHNEVLMKRSSDRFVPLLLQYIDYGKLFD |
| | | HIRFHVNMGKLRYLLKADKTCIDGQTRVRVIEQPLNGFGRLEE |
| | | VETMRKQENGTFGNSGIRIRDFENMKRDDANPANYPYIVETYT |
| | | HYILENNKVEMFISDEENPTPLLPVIEDDRYVVKTIPSCRMSTLEI |
| | | PAMAFHMFLFGSEKTEKLIIDVHDRYKRLFQAMQKEEVTAENI |
| | | ASFGIAESDLPQKIMDLISGNAHGKDVDAFIRLTVDDMLTDTER |
| | | RIKRFKDDRKSIRSADNKMGKRGFKQISTGKLADFLAKDIVLFQ |
| | | PSVNDGENKITGLNYRIMQSAIAVYDSGDDYEAKQQFKLMFEK |
| | | ARLIGKGTTEPHPFLYKVFVRSIPANAVDFYERYLIERKFYLIGL |
| | | SNEIKKGNRVDVPFIRRDQNKWKTPAMKTLGRIYSEDLPVELPR |
| | | QMFDNEIKSHLKSLPQMEGIDFNNANVTYLIAEYMKRVLNDDF |
| | | QTFYQWKRNYRYMDMLRGEYDRKGSLQHCFTSIEEREGLWKE |
| | | RASRTERYRKLASNKIRSNRQMRNASSEEIETILDKRLSNCRNE |
| | | YQKSEKIIRRYRVQDALLFLLAKKTLTELADFDGERFKLKEIMP |
| | | DAEKGILSEIMPMSFTFEKGGKIYTITSGGMKLKNYGDFFVLAS |
| | | DKRIGNLLELVGSNTVSKEDIMEEFKKYDQCRPEISSIVFNLEKW |
| | | AFDTYPELPARVDRKEKVDFWSILDVLSNNKDINNEQSYILRKI |
| | | RNAFDHNNYPDKGIVEIKALPEIAMSIKKAFGEYAIMK |
| Phaeodactylibacter | WP_044218239 | MTNTPKRRTLHRHPSYFGAFLNIARHNAFMIMEHLSTKYDMED |
| xiamenensis | | KNTLDEAQLPNAKLFGCLKKRYGKPDVTEGVSRDLRRYFPFLN |
| (SEQ ID | | YPLFLHLEKQQNAEQAATYDINPEDIEFTLKGFFRLLNQMRNNY |
| No. 178) | | SHYISNTDYGKFDKLPVQDIYEAAIFRLLDRGKHTKRFDVFESK |
| | | HTRHLESNNSEYRPRSLANSPDHENTVAFVTCLFLERKYAFPFL |
| | | SRLDCFRSTNDAAEGDPLIRKASHECYTMFCCRLPQPKLESSDIL |
| | | LDMVNELGRCPSALYNLLSEEDQARFHIKREEITGFEEDPDEELE |
| | | QEIVLKRHSDRFPYFALRYFDDTEAFQTLRFDVYLGRWRTKPV |
| | | YKKRIYGQERDRVLTQSIRTFTRLSRLLPIYENVKHDAVRQNEE |
| | | DGKLVNPDVTSQFHKSWIQIESDDRAFLSDRIEHFSPHYNFGDQ |
| | | VIGLKFINPDRYAAIQNVFPKLPGEEKKDKDAKLVNETADAIIST |
| | | HEIRSLFLYHYLSKKPISAGDERRFIQVDTETFIKQYIDTIKLFFED |
| | | IKSGELQPIADPPNYQKNEPLPYVRGDKEKTQEERAQYRERQKE |
| | | IKERRKELNTLLQNRYGLSIQYIPSRLREYLLGYKKVPYEKLAL |
| | | QKLRAQRKEVKKRIKDIEKMRTPRVGEQATWLAEDIVFLTPPK |
| | | MHTPERKTTKHPQKLNNDQFRIMQSSLAYFSVNKKAIKKFFQK |
| | | ETGIGLSNRETSHPFLYRIDVGRCRGILDFYTGYLKYKMDWLDD |
| | | AIKKVDNRKHGKKEAKKYEKYLPSSIQHKTPLELDYTRLPVYLP |
| | | RGLFKKAIVKALAAHADFQVEPEEDNVIFCLDQLLDGDTQDFY |
| | | NWQRYYRSALTEKETDNQLVLAHPYAEQILGTIKTLEGKQKNN |
| | | KLGNKAKQKIKDELIDLKRAKRRLLDREQYLRAVQAEDRALW |
| | | LMIQERQKQKAEHEEIAFDQLDLKNITKILTESIDARLRIPDTKV |
| | | DITDKLPLRRYGDLRRVAKDRRLVNLASYYHVAGLSEIPYDLV |
| | | KKELEEYDRRRVAFFEHVYQFEKEVYDRYAAELRNENPKGEST |
| | | YFSHWEYVAVAVKHSADTHFNELFKEKVMQLRNKFHHNEFPY |
| | | FDWLLPEVEKASAALYADRVFDVAEGYYQKMRKLMRQ |
| Flayobacterium | WP_045968377 | MDNNITVEKTELGLGITYNHDKVEDKHYFGGFFNLAQNNIDLV |
| sp. 316 | | AQEFKKRLLIQGKDSINIFANYFSDQCSITNLERGIKILAEYFPVV |
| (SEQ ID | | SYIDLDEKNKSKSIREHLILLLETINNLRNYYTHYYHKKIIIDGSL |
| No. 179) | | FPLLDTILLKVVLEIKKKKLKEDKTKQLLKKGLEKEMTILFNLM |
| | | KAEQKEKKIKGWNIDENIKGAVLNRAFSHLLYNDELSDYRKSK |
| | | YNTEDETLKDTLTESGILFLLSFFLNKKEQEQLKANIKGYKGKIA |
| | | SIPDEEITLKNNSLRNMATHWTYSHLTYKGLKHRIKTDHEKETL |
| | | LVNMVDYLSKVPHEIYQNLSEQNKSLFLEDINEYMRDNEENHD |
| | | SSEASRVIHPVIRKRYENKFAYFAIRFLDEFAEFPTLRFMVNVGN |
| | | YIHDNRKKDIGGTSLITNRTIKQQINVFGNLTEIHKKKNDYFEKE |
| | | ENKEKTLEWELFPNPSYHFQKENIPIFIDLEKSKETNDLAKEYAK |
| | | EKKKIFGSSRKKQQNTAKKNRETIINLVFDKYKTSDRKTVTFEQ |
| | | PTALLSFNELNSFLYAFLVENKTGKELEKIIIEKIANQYQILKNCS |
| | | STVDKTNDNIPKSIKKIVNTTTDSFYFEGKKIDIEKLEKDITIEIEK |
| | | TNEKLETIKENEESAQNYKRNERNTQKRKLYRKYVFFTNEIGIE |
| | | ATWITNDILRFLDNKENWKGYQHSELQKFISQYDNYKKEALGL |
| | | LESEWNLESDAFFGQNLKRMFQSNSTFETFYKKYLDNRKNTLE |
| | | TYLSAIENLKTMTDVRPKVLKKKWTELFRFFDKKIYLLSTIETKI |
| | | NELITKPINLSRGIFEEKPTFINGKNPNKENNQHLFANWFIYAKK |
| | | QTILQDFYNLPLEQPKAITNLKKHKYKLERSINNLKIEDIYIKQM |
| | | VDFLYQKLFEQSFIGSLQDLYTSKEKREIEKGKAKNEQTPDESFI |
| | | WKKQVEINTHNGRIIAKTKIKDIGKFKNLLTDNKIAHLISYDDRI |
| | | WDFSLNNDGDITKKLYSINTELESYETIRREKLLKQIQQFEQFLL |
| | | EQETEYSAERKHPEKFEKDCNPNFKKYIIEGVLNKIIPNHEIEEIEI |
| | | LKSKEDVFKINFSDILILNNDNIKKGYLLIMIRNKFAHNQLIDKN |
| | | LFNFSLQLYSKNENENFSEYLNKVCQNIIQEFKEKLK |
| Porphyromonas | WP_046201018 | MTEQSERPYNGTYYTLEDKHFWAAFLNLARHNAYITLTHIDRQ |
| gulae | | LAYSKADITNDQDVLSFKALWKNFDNDLERKSRLRSLILKHFSF |
| (SEQ ID | | LEGAAYGKKLFESKSSGNKSSKNKELTKKEKEELQANALSLDN |
| No. 180) | | LKSILFDFLQKLKDFRNYYSHYRHSESSELPLFDGNMLQRLYNV |
| | | FDVSVQRVKRDHEHNDKVDPHRHFNHLVRKGKKDRYGHNDN |
| | | PSFKHHFVDSEGMVTEAGLLFFVSLFLEKRDAIWMQKKIRGFK |
| | | GGTETYQQMTNEVFCRSRISLPKLKLESLRTDDWMLLDMLNEL |
| | | VRCPKPLYDRLREKDRARFRVPVDILPDEDDTDGGGEDPFKNT |
| | | LVRHQDRFPYFALRYFDLKKVFTSLRFHIDLGTYHFAIYKKMIG |
| | | EQPEDRHLTRNLYGFGRIQDFAEEHRPEEWKRLVRDLDYFETG |
| | | DKPYISQTTPHYHIEKGKIGLRFMPEGQHLWPSPEVGTTRTGRS |
| | | KYAQDKRLTAEAFLSVHELMPMMFYYFLLREKYSEEVSAEKV |
| | | QGRIKRVIEDVYAIYDAFARDEINTLKELDACLADKGIRRGHLP |
| | | KQMIAILSQEHKDMEEKIRKKLQEMIADTDHRLDMLDRQTDRK |
| | | IRIGRKNAGLPKSGVIADWLVRDMMRFQPVAKDTSGKPLNNSK |
| | | ANSTEYRMLQRALALFGGEKKRLTPYFRQMNLTGGNNPHPFLH |
| | | ETRWESHTNILSFYRSYLRARKAFLERIGRSDRMENRPFLLLKEP |
| | | KTDRQTLVAGWKSEFHLPRGIFTEAVRDCLIEMGYDEVGSYRE |
| | | VGFMAKAVPLYFERACEDRVQPFYDSPFNVGNSLKPKKGRFLS |
| | | KEERAEEWERGKERFRDLEAWSHSAARRIEDAFAGIEYASPGN |
| | | KKKIEQLLRDLSLWEAFESKLKVRADKINLAKLKKEILEAQEHP |
| | | YHDFKSWQKFERELRLVKNQDIITWMMCRDLMEENKVEGLDT |
| | | GTLYLKDIRPNVQEQGSLNVLNRVKPMRLPVVVYRADSRGHV |
| | | HKEEAPLATVYIEERDTKLLKQGNFKSFVKDRRLNGLFSFVDTG |
| | | GLAMEQYPISKLRVEYELAKYQTARVCVFELTLRLEESLLTRYP |
| | | HLPDESFRKMLESWSDPLLAKWPELHGKVRLLIAVRNAFSHNQ |
| | | YPMYDEAVFSSIRKYDPSSPDAIEERMGLNIAHRLSEEVKQAKE |
| | | TVERIIQV |
| WP_047431796 | Chryseobacterium | METQTIGHGIAYDHSKIQDKHFFGGFLNLAENNIKAVLKAFSEK |
| (SEQ | sp. | FNVGNVDVKQFADVSLKDNLPDNDFQKRVSFLKMYFPVVDFIN |
| ID No. | YR477 | IPNNRAKFRSDLTTLFKSVDQLRNFYTHYYHKPLDFDASLFILLD |
| 181) | | DIFARTAKEVRDQKMKDDKTRQLLSKSLSEELQKGYELQLERL |
| | | KELNRLGKKVNIHDQLGIKNGVLNNAFNHLIYKDGESFKTKLT |
| | | YSSALTSFESAENGIEISQSGLLFLLSMFLKRKEIEDLKNRNKGF |
| | | KAKVVIDEDGKVNGLKFMATHWVFSYLCFKGLKSKLSTEFHEE |
| | | TLLIQIIDELSKVPDELYCAFDKETRDKFIEDINEYVKEGHQDFSL |
| | | EDAKVIHPVIRKRYENKFNYFAIRFLDEFVKFPSLRFQVHVGNY |
| | | VHDRRIKNIDGTTFETERVVKDRIKVFGRLSEISSYKAQYLSSVS |
| | | DKHDETGWEIFPNPSYVFINNNIPIHISVDTSFKKEIADFKKLRRA |
| | | QVPDELKIRGAEKKRKFEITQMIGSKSVLNQEEPIALLSLNEIPAL |
| | | LYEILINGKEPAEIERIIKDKLNERQDVIKNYNPENWLPASQISRR |
| | | LRSNKGERIINTDKLLQLVTKELLVTEQKLKIISDNREALKQKKE |
| | | GKYIRKFIFTNSELGREAIWLADDIKRFMPADVRKEWKGYQHS |
| | | QLQQSLAFYNSRPKEALAILESSWNLKDEKIIWNEWILKSFTQN |
| | | KFFDAFYNEYLKGRKKYFAFLSEHIVQYTSNAKNLQKFIKQQM |
| | | PKDLFEKRHYIIEDLQTEKNKILSKPFIFPRGIFDKKPTFIKGVKV |
| | | EDSPESFANWYQYGYQKDHQFQKFYDWKRDYSDVFLEHLGKP |
| | | FINNGDRRTLGMEELKERIIIKQDLKIKKIKIQDLFLRLIAENLFQ |
| | | KVFKYSAKLPLSDFYLTQEERMEKENMAALQNVREEGDKSPNI |
| | | IKDNFIWSKMIPYKKGQIIENAVKLKDIGKLNVLSLDDKVQTLL |
| | | SYDDAKPWSKIALENEFSIGENSYEVIRREKLFKEIQQFESEILFR |
| | | SGWDGINHPAQLEDNRNPKFKMYIVNGILRKSAGLYSQGEDIW |
| | | FEYNADFNNLDADVLETKSELVQLAFLVTAIRNKFAHNQLPAK |
| | | EFYFYIRAKYGFADEPSVALVYLNFTKYAINEFKKVMI |
| Riemerella | WP_049354263 | MFFSFHNAQRVIFKHLYKAFDASLRMVKEDYKAHFTVNLTRDF |
| anatipestifer | | AHLNRKGKNKQDNPDFNRYRFEKDGFFTESGLLFFTNLFLDKR |
| (SEQ ID | | DAYWMLKKVSGFKASHKQREKMTTEVFCRSRILLPKLRLESRY |
| No. 182) | | DHNQMLLDMLSELSRCPKLLYEKLSEENKKHFQVEADGFLDEI |
| | | EEEQNPFKDTLIRHQDRFPYFALRYLDLNESFKSIRFQVDLGTYH |
| | | YCIYDKKIGDEQEKRHLTRTLLSFGRLQDFTEINRPQEWKALTK |
| | | DLDYKETSNQPFISKTTPHYHITDNKIGFRLGTSKELYPSLEIKDG |
| | | ANRIAKYPYNSGFVAHAFISVHELLPLMFYQHLTGKSEDLLKET |
| | | VRHIQRIYKDFEEERINTIEDLEKANQGRLPLGAFPKQMLGLLQ |
| | | NKQPDLSEKAKIKIEKLIAETKLLSHRLNTKLKSSPKLGKRREKL |
| | | IKTGVLADWLVKDFMRFQPVAYDAQNQPIKSSKANSTEFWFIR |
| | | RALALYGGEKNRLEGYFKQTNLIGNTNPHPFLNKFNWKACRNL |
| | | VDFYQQYLEQREKFLEAIKNQPWEPYQYCLLLKIPKENRKNLV |
| | | KGWEQGGISLPRGLFTEAIRETLSEDLMLSKPIRKEIKKHGRVGF |
| | | ISRAITLYFKEKYQDKHQSFYNLSYKLEAKAPLLKREEHYEYW |
| | | QQNKPQSPTESQRLELHTSDRWKDYLLYKRWQHLEKKLRLYR |
| | | NQDVMLWLMTLELTKNHFKELNLNYHQLKLENLAVNVQEAD |
| | | AKLNPLNQTLPMVLPVKVYPATAFGEVQYHKTPIRTVYIREEHT |
| | | KALKMGNFKALVKDRRLNGLFSFIKEENDTQKHPISQLRLRREL |
| | | EIYQSLRVDAFKETLSLEEKLLNKHTSLSSLENEFRALLEEWKK |
| | | EYAASSMVTDEHIAFIASVRNAFCHNQYPFYKEALHAPIPLFTV |
| | | AQPTTEEKDGLGIAEALLKVLREYCEIVKSQI |
| Porphyromonas | WP_052912312 | MTEQNEKPYNGTYYTLEDKHFWAAFFNLARHNAYITLAHIDRQ |
| gingivalis | | LAYSKADITNDEDILFFKGQWKNLDNDLERKARLRSLILKHFSF |
| (SEQ ID | | LEGAAYGKKLFESQSSGNKSSKKKELTKKEKEELQANALSLDN |
| No. 183) | | LKSILFDFLQKLKDFRNYYSHYRHPESSELPLFDGNMLQRLYNV |
| | | FDVSVQRVKRDHEHNDKVDPHRHFNHLVRKGKKDKYGNNDN |
| | | PFFKHHFVDREEKVTEAGLLFFVSLFLEKRDAIWMQKKIRGFKG |
| | | GTEAYQQMTNEVFCRSRISLPKLKLESLRTDDWMLLDMLNELV |
| | | RCPKLLYDRLREEDRARFRVPVDILSDEDDTDGTEEDPFKNTLV |
| | | RHQDRFPYFALRYFDLKKVFTSLRFHIDLGTYHFAIYKKNIGEQ |
| | | PEDRHLTRNLYGFGRIQDFAEEHRPEEWKRLVRDLDYFETGDK |
| | | PYITQTTPHYHIEKGKIGLRFVPEGQLLWPSPEVGATRTGRSKY |
| | | AQDKRFTAEAFLSVHELMPMMFYYFLLREKYSEEASAEKVQG |
| | | RIKRVIEDVYAVYDAFARDEINTRDELDACLADKGIRRGHLPRQ |
| | | MIAILSQEHKDMEEKVRKKLQEMIADTDHRLDMLDRQTDRKIR |
| | | IGRKNAGLPKSGVIADWLVRDMMRFQPVAKDTSGKPLNNSKA |
| | | NSTEYRMLQRALALFGGEKERLTPYFRQMNLTGGNNPHPFLHE |
| | | TRWESHTNILSFYRSYLKARKAFLQSIGRSDREENHRFLLLKEPK |
| | | TDRQTLVAGWKSEFHLPRGIFTEAVRDCLIEMGYDEVGSYKEV |
| | | GFMAKAVPLYFERACKDRVQPFYDYPFNVGNSLKPKKGRFLSK |
| | | EKRAEEWESGKERFRDLEAWSHSAARRIEDAFVGIEYASWENK |
| | | KKIEQLLQDLSLWETFESKLKVKADKINIAKLKKEILEAKEHPY |
| | | HDFKSWQKFERELRLVKNQDIITWMMCRDLMEENKVEGLDTG |
| | | TLYLKDIRTDVQEQGSLNVLNHVKPMRLPVVVYRADSRGHVH |
| | | KEEAPLATVYIEERDTKLLKQGNFKSFVKDRRLNGLFSFVDTGA |
| | | LAMEQYPISKLRVEYELAKYQTARVCAFEQTLELEESLLTRYPH |
| | | LPDESFREMLESWSDPLLDKWPDLQREVRLLIAVRNAFSHNQY |
| | | PMYDETIFSSIRKYDPSSLDAIEERMGLNIAHRLSEEVKLAKEMV |
| | | ERIIQA |
| Porphyromonas | WP_058019250 | MTEQNEKPYNGTYYTLKDKHFWAAFFNLARHNAYITLTHIDRQ |
| gingivalis | | LAYSKADITNDEDILFFKGQWKNLDNDLERKARLRSLILKHFSF |
| (SEQ ID | | LEGAAYGKKLFESQSSGNKSSKKKELTKKEKEELQANALSLDN |
| No. 184) | | LKSILFDFLQKLKDFRNYYSHYRHPESSELPMFDGNMLQRLYN |
| | | VFDVSVQRVKRDHEHNDKVDPHRHFNHLVRKGKKDRCGNND |
| | | NPFFKHHFVDREGKVTEAGLLFFVSLFLEKRDAIWMQKKIRGF |
| | | KGGTETYQQMTNEVFCRSRISLPKLKLESLRTDDWMLLDMLNE |
| | | LVRCPKSLYDRLREEDRACFRVPVDILSDEDDTDGAEEDPFKNT |
| | | LVRHQDRFPYFALRYFDLKKVFTSLRFHIDLGTYHFAIYKKNIG |
| | | EQPEDRHLTRNLYGFGRIQDFAEEHRPEEWKRLVRDLDCFETG |
| | | DKPYITQTTPHYHIEKGKIGLRFVPEGQHLWPSPEVGATRTGRS |
| | | KYAQDKRFTAEAFLSVHELMPMMFYYFLLREKYSEEVSAERV |
| | | QGRIKRVIEDVYAVYDAFARDEINTRDELDACLADKGIRRGHLP |
| | | RQMIAILSQKHKDMEEKVRKKLQEMIADTDHRLDMLDRQTDR |
| | | KIRIGRKNAGLPKSGVIADWLVRDMMRFQPVAKDTSGKPLNNS |
| | | KANSTEYRMLQRALALFGGEKERLTPYFRQMNLTGGNNPHPFL |
| | | HETRWESHTNILSFYRSYLKARKAFLQSIGRSDRVENHRFLLLK |
| | | EPKTDRQTLVAGWKGEFHLPRGIFTEAVRDCLIEMGLDEVGSY |
| | | KEVGFMAKAVPLYFERACKDRVQPFYDYPFNVGNSLKPKKGR |
| | | FLSKEKRAEEWESGKERFRDLEAWSHSAARRIEDAFAGIENASR |
| | | ENKKKIEQLLQDLSLWETFESKLKVKADKINIAKLKKEILEAKE |
| | | HPYLDFKSWQKFERELRLVKNQDIITWMMCRDLMEENKVEGL |
| | | DTGTLYLKDIRTDVQEQGSLNVLNHVKPMRLPVVVYRADSRG |
| | | HVHKEQAPLATVYIEERDTKLLKQGNFKSFVKDRRLNGLFSFV |
| | | DTGALAMEQYPISKLRVEYELAKYQTARVCAFEQTLELEESLLT |
| | | RYPHLPDENFRKMLESWSDPLLDKWPDLHRKVRLLIAVRNAFS |
| | | HNQYPMYDEAVFSSIRKYDPSSPDAIEERMGLNIAHRLSEEVKQ |
| | | AKEMAERIIQA |
| Flavobacterium | WP_060381855 | MSSKNESYNKQKTFNHYKQEDKYFFGGFLNNADDNLRQVGKE |
| columnare | | FKTRINFHNNNELASVFKDYFNKEKSVAKREHALNLLSNYFP |
| (SEQ ID | | VLERIQKHTNHNFEQTREIFELLLDTIKKLRDYYTHHYHKPITIN |
| No. 185) | | PKVYDFLDDTLLDVLITIKKKKVKNDTSRELLKEKFRPELTQLK |
| | | NQKREELIKKGKKLLEENLENAVFNHCLRPFLEENKTDDKQNK |
| | | TVSLRKYRKSKPNEETSITLTQSGLVFLISFFLHRKEFQVFTSGLE |
| | | GFKAKVNTIKEEEISLNKNNIVYMITHWSYSYYNFKGLKHRIKT |
| | | DQGVSTLEQNNTTHSLTNTNTKEALLTQIVDYLSKVPNEIYETL |
| | | SEKQQKEFEEDINEYMRENPENEDSTFSSIVSHKVIRKRYENKFN |
| | | YFAMRFLDEYAELPTLRFMVNFGDYIKDRQKKILESIQFDSERII |
| | | KKEIHLFEKLGLVTEYKKNVYLKETSNIDLSRFPLFPSPSYVMA |
| | | NNNIPFYIDSRSNNLDEYLNQKKKAQSQNRKRNLTFEKYNKEQ |
| | | SKDAIIAMLQKEIGVKDLQQRSTIGLLSCNELPSMLYEVIVKDIK |
| | | GAELENKIAQKIREQYQSIRDFTLDSPQKDNIPTTLTKTISTDTSV |
| | | TFENQPIDIPRLKNALQKELTLTQEKLLNVKQHEIEVDNYNRNK |
| | | NTYKFKNQPKDKVDDNKLQRKYVFYRNEIGQEANWLASDLIH |
| | | FMKNKSLWKGYMHNELQSFLAFFEDKKNDCIALLETVFNLKED |
| | | CILTKDLKNLFLKHGNFIDFYKEYLKLKEDFLNTESTFLENGFIG |
| | | LPPKILKKELSKRLNYIFIVFQKRQFIIKELEEKKNNLYADAINLS |
| | | RGIFDEKPTMIPFKKPNPDEFASWFVASYQYNNYQSFYELTPDK |
| | | IENDKKKKYKNLRAINKVKIQDYYLKLMVDTLYQDLFNQPLDK |
| | | SLSDFYVSKTDREKIKADAKAYQKRNDSFLWNKVIHLSLQNNR |
| | | ITANPKLKDIGKYKRALQDEKIATLLTYDDRTWTYALQKPEKE |
| | | NENDYKELHYTALNMELQEYEKVRSKKLLKQVQELEKQILDKF |
| | | YDFSNNATHPEDLEIEDKKGKRHPNFKLYITKALLKNESEIINLE |
| | | NIDIEILIKYYDYNTEKLKEKIKNMDEDEKAKIVNTKENYNKITN |
| | | VLIKKALVLIIIRNKMAHNQYPPKFIYDLATRFVPKKEEEYFACY |
| | | FNRVFETITTELWENKKKAKEIV |
| Porphyromonas | WP_061156470 | MTEQNERPYNGTYYTLEDKHFWAAFFNLARHNAYITLTHIDRQ |
| gingivalis | | LAYSKADITNDEDILFFKGQWKNLDNDLERKARLRSLILKHFSF |
| (SEQ ID | | LEGAAYGKKLFENKSSGNKSSKKKELTKKEKEELQANALSLDN |
| No. 186) | | LKSILFDFLQKLKDFRNYYSHYRHPESSELPLFDGNMLQRLYNV |
| | | FDVSVQRVKRDHEHNDKVDPHRHFNHLVRKGKKDRCGNNDN |
| | | PFFKHHFVDREGKVTEAGLLFFVSLFLEKRDAIWMQKKIRGFK |
| | | GGTEAYQQMTNEVFCRSRISLPKLKLESLRTDDWMLLDMLNEL |
| | | VRCPKSLYDRLREEDRARFRVPVDILSDEDDTDGTEEDPFKNTL |
| | | VRHQDRFPYFALRYFDLKKVFTSLRFHIDLGTYHFAIYKKNIGE |
| | | QPEDRHLTRNLYGFGRIQDFAEEHRPEEWKRLVRDLDYFETGD |
| | | KPYITQTTPHYHIEKGKIGLRFVPEGQHLWPSPEVGATRTGRSK |
| | | YAQDKRLTAEAFLSVHELMPMMFYYFLLREKYSEEVSAEKVQ |
| | | GRIKRVIEDVYAVYDAFARGEIDTLDRLDACLADKGIRRGHLPR |
| | | QMIAILSQEHKDMEEKVRKKLQEMIADTDHRLDMLDRQTDRKI |
| | | RIGRKNAGLPKSGVIADWLVRDMMRFQPVAKDTSGKPLNNSK |
| | | ANSTEYRMLQRALALFGGEKERLTPYFRQMNLTGGNNPHPFLH |
| | | ETRWESHTNILSFYRSYLKARKAFLQSIGRSDREENHRFLLLKEP |
| | | KTDRQTLVAGWKSEFHLPRGIFTEAVRDCLIEMGYDEVGSYKE |
| | | VGFMAKAVPLYFERACKDRVQPFYDYPFNVGNSLKPKKGRFLS |
| | | KEKRAEEWESGKERFRLAKLKKEILEAKEHPYLDFKSWQKFER |
| | | ELRLVKNQDIITWMMCRDLMEENKVEGLDTGTLYLKDIRTEVQ |
| | | EQGSLNVLNRVKPMRLPVVVYRADSRGHVHKEQAPLATVYIEE |
| | | RDTKLLKQGNFKSFVKDRRLNGLFSFVDTGGLAMEQYPISKLR |
| | | VEYELAKYQTARVCAFEQTLELEESLLTRCPHLPDKNFRKMLES |
| | | WSDPLLDKWPDLQREVWLLIAVRNAFSHNQYPMYDEAVFSSIR |
| | | KYDPSSPDAIEERMGLNIAHRLSEEVKQAKEMAERIIQA |
| Porphyromonas | WP_061156637 | MNTVPASENKGQSRTVEDDPQYFGLYLNLARENLIEVESHVRIK |
| gingivalis | | FGKKKLNEESLKQSLLCDHLLSVDRWTKVYGHSRRYLPFLHYF |
| (SEQ ID | | DPDSQIEKDHDSKTGVDPDSAQRLIRELYSLLDFLRNDFSHNRL |
| No. 187) | | DGTTFEHLEVSPDISSFITGTYSLACGRAQSRFADFFKPDDFVLA |
| | | KNRKEQLISVADGKECLTVSGLAFFICLFLDREQASGMLSRIRGF |
| | | KRTDENWARAVHETFCDLCIRHPHDRLESSNTKEALLLDMLNE |
| | | LNRCPRILYDMLPEEERAQFLPALDENSMNNLSENSLNEESRLL |
| | | WDGSSDWAEALTKRIRHQDRFPYLMLRFIEEMDLLKGIRFRVD |
| | | LGEIELDSYSKKVGRNGEYDRTITDHALAFGKLSDFQNEEEVSR |
| | | MISGEASYPVRFSLFAPRYAIYDNKIGYCHTSDPVYPKSKTGEK |
| | | RALSNPQSMGFISVHDLRKLLLMELLCEGSFSRMQSGFLRKANR |
| | | ILDETAEGKLQFSALFPEMRHRFIPPQNPKSKDRREKAETTLEKY |
| | | KQEIKGRKDKLNSQLLSAFDMNQRQLPSRLLDEWMNIRPASHS |
| | | VKLRTYVKQLNEDCRLRLRKFRKDGDGKARAIPLVGEMATFLS |
| | | QDIVRMIISEETKKLITSAYYNEMQRSLAQYAGEENRRQFRAIV |
| | | AELHLLDPSSGHPFLSATMETAHRYTEDFYKCYLEKKREWLAK |
| | | TFYRPEQDENTKRRISVFFVPDGEARKLLPLLIRRRMKEQNDLQ |
| | | DWIRNKQAHPIDLPSHLFDSKIMELLKVKDGKKKWNEAFKDW |
| | | WSTKYPDGMQPFYGLRRELNIHGKSVSYIPSDGKKFADCYTHL |
| | | MEKTVQDKKRELRTAGKPVPPDLAADIKRSFHRAVNEREFMLR |
| | | LVQEDDRLMLMAINKMMTDREEDILPGLKNIDSILDKENQFSLA |
| | | VHAKVLEKEGEGGDNSLSLVPATIEIKSKRKDWSKYIRYRYDR |
| | | RVPGLMSHFPEHKATLDEVKTLLGEYDRCRIKIFDWAFALEGAI |
| | | MSDRDLKPYLHESSSREGKSGEHSTLVKMLVEKKGCLTPDESQ |
| | | YLILIRNKAAHNQFPCAAEMPLIYRDVSAKVGSIEGSSAKDLPE |
| | | GSSLVDSLWKKYEMIIRKILPILDPENRFFGKLLNNMSQPINDL |
| Riemerella | WP_061710138 | MFFSFHNAQRVIFKHLYKAFDASLRMVKEDYKAHFTVNLTRDF |
| anatipestifer | | AHLNRKGKNKQDNPDFNRYRFEKDGFFTESGLLFFTNLFLDKR |
| (SEQ ID | | DAYWMLKKVSGFKASHKQSEKMTTEVFCRSRILLPKLRLESRY |
| No. 188) | | DHNQMLLDMLSELSRCPKLLYEKLSEKDKKCFQVEADGFLDEI |
| | | EEEQNPFKDTLIRHQDRFPYFALRYLDLNESFKSIRFQVDLGTYH |
| | | YCIYDKKIGYEQEKRHLTRTLLNFGRLQDFTEINRPQEWKALTK |
| | | DLDYNETSNQPFISKTTPHYHITDNKIGFRLRTSKELYPSLEVKD |
| | | GANRIAKYPYNSDFVAHAFISISVHELLPLMFYQHLTGKSEDLL |
| | | KETVRHIQRIYKDFEEERINTIEDLEKANQGRLPLGAFPKQMLGL |
| | | LQNKQPDLSEKAKIKIEKLIAETKLLSHRLNTKLKSSPKLGKRRE |
| | | KLIKTGVLADWLVKDFMRFQPVVYDAQNQPIKSSKANSTESRLI |
| | | RRALALYGGEKNRLEGYFKQTNLIGNTNPHPFLNKFNWKACRN |
| | | LVDFYQQYLEQREKFLEAIKHQPWEPYQYCLLLKVPKENRKNL |
| | | VKGWEQGGISLPRGLFTEAIRETLSKDLTLSKPIRKEIKKHGRVG |
| | | FISRAITLYFKEKYQDKHQSFYNLSYKLEAKAPLLKKEEHYEYW |
| | | QQNKPQSPTESQRLELHTSDRWKDYLLYKRWQHLEKKLRLYR |
| | | NQDIMLWLMTLELTKNHFKELNLNYHQLKLENLAVNVQEADA |
| | | KLNPLNQTLPMVLPVKVYPTTAFGEVQYHETPIRTVYIREEQTK |
| | | ALKMGNFKALVKDRHLNGLFSFIKEENDTQKHPISQLRLRRELE |
| | | IYQSLRVDAFKETLSLEEKLLNKHASLSSLENEFRTLLEEWKKK |
| | | YAASSMVTDKHIAFIASVRNAFCHNQYPFYKETLHAPILLFTVA |
| | | QPTTEEKDGLGIAEALLRVLREYCEIVKSQI |
| Flavobacterium | WP_063744070 | MSSKNESYNKQKTFNHYKQEDKYFFGGFLNNADDNLRQVGKE |
| columnare | | FKTRINFLASVFKDYFNKEKSVAKREHALNLLSNYFP |
| (SEQ ID | | VLERIQKHTNHNFEQTREIFELLLDTIKKLRDYYTHHYHKPITIN |
| No. 189) | | PKIYDFLDDTLLDVLITIKKKKVKNDTSRELLKEKLRPELTQLKN |
| | | QKREELIKKGKKLLEENLENAVFNHCLRPFLEENKTDDKQNKT |
| | | VSLRKYRKSKPNEETSITLTQSGLVFLMSFFLHRKEFQVFTSGLE |
| | | GFKAKVNTIKEEKISLNKNNIVYMITHWSYSYYNFKGLKHRIKT |
| | | DQGVSTLEQNNTTHSLTNTNTKEALLTQIVDYLSKVPNEIYETL |
| | | SEKQQKEFEEDINEYMRENPENEDSTFSSIVSHKVIRKRYENKFN |
| | | YFAMRFLDEYAELPTLRFMVNFGDYIKDRQKKILESIQFDSERII |
| | | KKEIHLFEKLGLVTEYKKNVYLKETSNIDLSRFPLFPSPSYVMA |
| | | NNNIPFYIDSRSNNLDEYLNQKKKAQSQNRKRNLTFEKYNKEQ |
| | | SKDAIIAMLQKEIGVKDLQQRSTIGLLSCNELPSMLYEVIVKDIK |
| | | GAELENKIAQKIREQYQSIRDFTLNSPQKDNIPTTLIKTISTDTSV |
| | | TFENQPIDIPRLKNAIQKELALTQEKLLNVKQHEIEVNNYNRNK |
| | | NTYKFKNQPKDKVDDNKLQRKYVFYRNEIGQEANWLASDLIH |
| | | FMKNKSLWKGYMHNELQSFLAFFEDKKNDCIALLETVFNLKED |
| | | CILTKDLKNLFLKHGNFIDFYKEYLKLKEDFLNTESTFLENGFIG |
| | | LPPKILKKELSKRLNYIFIVFQKRQFIIKELEEKKNNLYADAINLS |
| | | RGIFDEKPTMIPFKKPNPDEFASWFVASYQYNNYQSFYELTPDK |
| | | IENDKKKKYKNLRAINKVKIQDYYLKLMVDTLYQDLFNQPLDK |
| | | SLSDFYVSKTDREKIKADAKAYQKRNDSFLWNKVIHLSLQNNR |
| | | ITANPKLKDIGKYKRALQDEKIATLLTYDDRTWTYALQKPEKE |
| | | NENDYKELHYTALNMELQEYEKVRSKKLLKQVQELEKQILDKF |
| | | YDFSNNATHPEDLEIEDKKGKRHPNFKLYITKALLKNESEIINLE |
| | | NIDIEILIKYYDYNTEKLKEKIKNMDEDEKAKIVNTKENYNKITN |
| | | VLIKKALVLIIIRNKMAHNQYPPKFIYDLATRFVPKKEEEYFACY |
| | | FNRVFETITTELWENKKKAKEIV |
| Riemerel1a | WP_064970887 | MEKPLPPNVYTLKHKFFWGAFLNIARHNAFITICHINEQLGLTTP |
| anatipestifer | | PNDDKIADVVCGTWNNILNNDHDLLKKSQLTELILKHFPFLAA |
| (SEQ ID | | MCYHPPKKEGKKKGSQKEQQKEKENEAQSQAEALNPSELIKVL |
| No. 190) | | KTLVKQLRTLRNYYSHHSHKKPDAEKDIFKHLYKAFDASLRMV |
| | | KEDYKAHFTVNLTQDFAHLNRKGKNKQDNPDFDRYRFEKDGF |
| | | FTESGLLFFTNLFLDKRDAYWMLKKVSGFKASHKQSEKMTTEV |
| | | FCRSRILLPKLRLESRYDHNQMLLDMLSELSRYPKLLYEKLSEE |
| | | DKKRFQVEADGFLDEIEEEQNPFKDTLIRHQDRFPYFALRYLDL |
| | | NESFKSIRFQVDLGTYHYCIYDKKIGDEQEKRHLTRTLLSFGRL |
| | | QDFTEINRPQEWKALTKDLDYKETSKQPFISKTTPHYHITDNKIG |
| | | FRLGTSKELYPSLEVKDGANRIAQYPYNSDFVAHAFISVHELLP |
| | | LMFYQHLTGKSEDLLKETVRHIQRIYKDFEEERINTIEDLEKANQ |
| | | GRLPLGAFPKQMLGLLQNKQPDLSEKAKIKIEKLIAETKLLSHR |
| | | LNTKLKSSPKLGKRREKLIKTGVLADWLVKDFMRFQPVAYDA |
| | | QNQPIESSKANSTEFQLIQRALALYGGEKNRLEGYFKQTNLIGN |
| | | TNPHPFLNKFNWKACRNLVDFYQQYLEQREKFLEAIKNQPWEP |
| | | YQYCLLLKIPKENRKNLVKGWEQGGISLPRGLFTEAIRETLSKD |
| | | LTLSKPIRKEIKKHGRVGFISRAITLYFREKYQDDHQSFYDLPYK |
| | | LEAKASPLPKKEHYEYWQQNKPQSPTELQRLELHTSDRWKDYL |
| | | LYKRWQHLEKKLRLYRNQDVMLWLMTLELTKNHFKELNLNY |
| | | HQLKLENLAVNVQEADAKLNPLNQTLPMVLPVKVYPATAFGE |
| | | VQYQETPIRTVYIREEQTKALKMGNFKALVKDRRLNGLFSFIKE |
| | | ENDTQKHPISQLRLRRELEIYQSLRVDAFKETLNLEEKLLKKHTS |
| | | LSSVENKFRILLEEWKKEYAASSMVTDEHIAFIASVRNAFCHNQ |
| | | YPFYEEALHAPIPLFTVAQQTTEEKDGLGIAEALLRVLREYCEIV |
| | | KSQI |
| Sinomicrobium | WP_072319476.1 | MESTTTLGLHLKYQHDLFEDKHYFGGGVNLAVQNIESIFQAFA |
| oceani | | ERYGIQNPLRKNGVPAINNIFHDNISISNYKEYLKFLKQYLPVVG |
| (SEQ ID | | FLEKSNEINIFEFREDFEILINAIYKLRHFYTHYYHSPIKLEDRFYT |
| No. 191) | | CLNELFVAVAIQVKKHKMKSDKTRQLLNKNLHQLLQQLIEQKR |
| | | EKLKDKKAEGEKVSLDTKSIENAVLNDAFVHLLDKDENIRLNY |
| | | SSRLSEDIITKNGITLSISGLLFLLSLFLQRKEAEDLRSRIEGFKGK |
| | | GNELRFMATHWVFSYLNVKRIKHRLNTDFQKETLLIQIADELSK |
| | | VPDEVYKTLDHENRSKFLEDINEYIREGNEDASLNESTVVHGVI |
| | | RKRYENKFHYLVLRYLDEFVDFPSLRFQVHLGNYIHDRRDKVI |
| | | DGTNFITNRVIKEPIKVFGKLSHVSKLKSDYMESLSREHKNGWD |
| | | VFPNPSYNFVGHNIPIFINLRSASSKGKELYRDLMKIKSEKKKKS |
| | | REEGIPMERRDGKPTKIEISNQIDRNIKDNNFKDIYPGEPLAMLS |
| | | LNELPALLFELLRRPSITPQDIEDRMVEKLYERFQIIRDYKPGDG |
| | | LSTSKISKKLRKADNSTRLDGKKLLRAIQTETRNAREKLHTLEE |
| | | NKALQKNRKRRTVYTTREQGREASWLAQDLKRFMPIASRKEW |
| | | RGYHHSQLQQILAFYDQNPKQPLELLEQFWDLKEDTYVWNSWI |
| | | HKSLSQHNGFVPMYEGYLKGRLGYYKKLESDIIGFLEEHKVLK |
| | | RYYTQQHLNVIFRERLYFIKTETKQKLELLARPLVFPRGIFDDKP |
| | | TFVQDKKVVDHPELFADWYVYSYKDDHSFQEFYHYKRDYNEI |
| | | FETELSWDIDFKDNKRQLNPSEQMDLFRMKWDLKIKKIKIQDIF |
| | | LKIVAEDIYLKIFGHKIPLSLSDFYISRQERLTLDEQAVAQSMRLP |
| | | GDTSENQIKESNLWQTTVPYEKEQIREPKIKLKDIGKFKYFLQQ |
| | | QKVLNLLKYDPQHVWTKAELEEELYIGKHSYEVVRREMLLQK |
| | | CHQLEKHILEQFRFDGSNHPRELEQGNHPNFKMYIVNGILTKRG |
| | | ELEIEAENWWLELGNSKNSLDKVEVELLTMKTIPEQKAFLLILIR |
| | | NKFAHNQLPADNYFHYASNLMNLKKSDTYSLFWFTVADTIVQ |
| | | EFMSL |
| Reichenbachiella | WP_073124441.1 | MKTNPLIASSGEKPNYKKFNTESDKSFKKIFQNKGSIAPIAEKAC |
| agariperforans | | KNFEIKSKSPVNRDGRLHYFSVGHAFKNIDSKNVFRYELDESQM |
| (SEQ | | DMKPTQFLALQKEFFDFQGALNGLLKHIRNVNSHYVHTFEKLEI |
| ID No. | | QSINQKLITFLIEAFELAVIHSYLNEEELSYEAYKDDPQSGQKLV |
| 192) | | QFLCDKFYPNKEHEVEERKTILAKNKRQALEHLLFIEVTSDIDW |
| | | KLFEKHKVFTISNGKYLSFHACLFLLSLFLYKSEANQLISKIKGF |
| | | KRNDDNQYRSKRQIFTFFSKKFTSQDVNSEEQHLVKFRDVIQYL |
| | | NHYPSAWNKHLELKSGYPQMTDKLMRYIVEAEIYRSFPDQTDN |
| | | HRFLLFAIREFFGQSCLDTWTGNTPINFSNQEQKGFSYEINTSAEI |
| | | KDIETKLKALVLKGPLNFKEKKEQNRLEKDLRREKKEQPTNRV |
| | | KEKLLTRIQHNMLYVSYGRNQDRFMDFAARFLAETDYFGKDA |
| | | KFKMYQFYTSDEQRDHLKEQKKELPKKEFEKLKYHQSKLVDY |
| | | FTYAEQQARYPDWDTPFVVENNAIQIKVTLFNGAKKIVSVQRN |
| | | LMLYLLEDALYSEKRENAGKGLISGYFVHHQKELKDQLDILEK |
| | | ETEISREQKREFKKLLPKRLLHRYSPAQINDTTEWNPMEVILEEA |
| | | KAQEQRYQLLLEKAILHQTEEDFLKRNKGKQFKLRFVRKAWH |
| | | LMYLKELYMNKVAEHGHHKSFHITKEEFNDFCRWMFAFDEVP |
| | | KYKEYLCDYFSQKGFFNNAEFKDLIESSTSLNDLYEKTKQRFEG |
| | | WSKDLTKQSDENKYLLANYESMLKDDMLYVNISHFISYLESKG |
| | | KINRNAHGHIAYKALNNVPHLIEEYYYKDRLAPEEYKSHGKLY |
| | | NKLKTVKLEDALLYEMAMHYLSLEPALVPKVKTKVKDILSSNI |
| | | AFDIKDAAGHHLYHLLIPFHKIDSFVALINHQSQQEKDPDKTSFL |
| | | AKIQPYLEKVKNSKDLKAVYHYYKDTPHTLRYEDLNMIHSHIV |
| | | SQSVQFTKVALKLEEYFIAKKSITLQIARQISYSEIADLSNYFTDE |
| | | VRNTAFHFDVPETAYSMILQGIESEFLDREIKPQKPKSLSELSTQ |
| | | QVSVCTAFLETLHNNLFDRKDDKKERLSKARERYFEQIN |

[0543] In certain example embodiments, the CRISPR effector protein is a Cas13a protein selected from Table 2.

TABLE 2

| | | | |
|---|---|---|---|
| c2c2-5 | 1 | Lachnospiraceae | MQISKVNHKHVAVGQKDRERITGFIYNDPVGDEKSLEDVVA |
| | | bacterium | KRANDTKVLFNVFNTKDLYDSQESDKSEKDKEIISKGAKFV |
| | | MA2020 | AKSFNSAITILKKQNKIYSTLTSQQVIKELKDKFGGARIYDDD |
| | | (SEQ ID | IEEALTETLKKSFRKENVRNSIKVLIENAAGIRSSLSKDEEELI |
| | | No. 193) | QEYFVKQLVEEYTKTKLQKNVVKSIKNQNMVIQPDSDSQVL |
| | | | SLSESRREKQSSAVSSDTLVNCKEKDVLKAFLTDYAVLDEDE |
| | | | RNSLLWKLRNLVNLYFYGSESIRDYSYTKEKSVWKEHDEQK |
| | | | ANKTLFIDEICHITKIGKNGKEQKVLDYEENRSRCRKQNINY |
| | | | YRSALNYAKNNTSGIFENEDSNHFWIHLIENEVERLYNGIEN |
| | | | GEEFKFETGYISEKVWKAVINHLSIKYIALGKAVYNYAMKEL |
| | | | SSPGDIEPGKIDDSYINGITSFDYEIIKAEESLQRDISMNVVFAT |
| | | | NYLACATVDTDKDFLLFSKEDIRSCTKKDGNLCKNIMQFWG |
| | | | GYSTWKNFCEEYLKDDKDALELLYSLKSMLYSMRNSSFHFS |
| | | | TENVDNGSWDTELIGKLFEEDCNRAARIEKEKFYNNNLHMF |
| | | | YSSSLLEKVLERLYSSHHERASQVPSFNRVFVRKNFPSSLSEQ |
| | | | RITPKFTDSKDEQIWQSAVYYLCKEIYYNDFLQSKEAYKLFR |
| | | | EGVKNLDKNDINNQKAADSFKQAVVYYGKAIGNATLSQVC |
| | | | QAIMTEYNRQNNDGLKKKSAYAEKQNSNKYKHYPLFLKQV |
| | | | LQSAFWEYLDENKEIYGFISAQIHKSNVEIKAEDFIANYSSQQ |
| | | | YKKLVDKVKKTPELQKWYTLGRLINPRQANQFLGSIRNYVQ |
| | | | FVKDIQRRAKENGNPIRNYYEVLESDSIIKILEMCTKLNGTTS |
| | | | NDIHDYFRDEDEYAEYISQFVNFGDVHSGAALNAFCNSESEG |
| | | | KKNGIYYDGINPIVNRNWVLCKLYGSPDLISKITSRVNENMIH |
| | | | DFHKQEDLIREYQIKGICSNKKEQQDLRTFQVLKNRVELRDI |
| | | | VEYSEIINELYGQLIKWCYLRERDLMYFQLGFHYLCLNNASS |
| | | | KEADYIKINVDDRNISGAILYQIAAMYINGLPVYYKKDDMY |
| | | | VALKSGKKASDELNSNEQTSKKINYFLKYGNNILGDKKDQL |
| | | | YLAGLELFENVAEHENIIIFRNEIDHFHYFYDRDRSMLDLYSE |
| | | | VFDRFFTYDMKLRKNVVNMLYNILLDHNIVSSFVFETGEKK |
| | | | VGRGDSEVIKPSAKIRLRANNGVSSDVFTYKVGSKDELKIAT |
| | | | LPAKNEEFLLNVARLIYYPDMEAVSENMVREGVVKVEKSND |
| | | | KKGKISRGSNTRSSNQSKYNNKSKNRMNYSMGSIFEKMDLK |
| | | | FD |
| c2c2-6 | 2 | Lachnospiraceae | MKISKVREENRGAKLTVNAKTAVVSENRSQEGILYNDPSRY |
| | | bacterium | GKSRKNDEDRDRYIESRLKSSGKLYRIFNEDKNKRETDELQ |
| | | NK4A179 | WFLSEIVKKINRRNGLVLSDMLSVDDRAFEKAFEKYAELSYT |
| | | (SEQ ID | NRRNKVSGSPAFETCGVDAATAERLKGIISETNFINRIKNNID |
| | | No. 194) | NKVSEDIIDRIIAKYLKKSLCRERVKRGLKKLLMNAFDLPYS |
| | | | DPDIDVQRDFIDYVLEDFYHVRAKSQVSRSIKNMNMPVQPE |
| | | | GDGKFAITVSKGGTESGNKRSAEKEAFKKFLSDYASLDERV |
| | | | RDDMLRRMRRLVVLYFYGSDDSKLSDVNEKFDVWEDHAA |
| | | | RRVDNREFIKLPLENKLANGKTDKDAERIRKNTVKELYRNQ |
| | | | NIGCYRQAVKAVEEDNNGRYFDDKMLNMFFIHRIEYGVEKI |
| | | | YANLKQVTEFKARTGYLSEKIWKDLINYISIKYIAMGKAVYN |
| | | | YAMDELNASDKKEIELGKISEEYLSGISSFDYELIKAEEMLQR |
| | | | ETAVYVAFAARHLSSQTVELDSENSDFLLLKPKGTMDKNDK |
| | | | NKLASNNILNFLKDKETLRDTILQYFGGHSLWTDFPFDKYLA |
| | | | GGKDDVDFLTDLKDVIYSMRNDSFHYATENHNNGKWNKEL |
| | | | ISAMFEHETERMTVVMKDKFYSNNLPMFYKNDDLKKLLIDL |
| | | | YKDNVERASQVPSFNKVFVRKNFPALVRDKDNLGIELDLKA |
| | | | DADKGENELKFYNALYYMFKEIYYNAFLNDKNVRERFITKA |
| | | | TKVADNYDRNKERNLKDRIKSAGSDEKKKLREQLQNYIAEN |
| | | | DFGQRIKNIVQVNPDYTLAQICQLIMTEYNQQNNGCMQKKS |
| | | | AARKDINKDSYQHYKMLLLVNLRKAFLEFIKENYAFVLKPY |
| | | | KHDLCDKADFVPDFAKYVKPYAGLISRVAGSSELQKWYIVS |
| | | | RFLSPAQANHMLGFLHSYKQYVWDIYRRASETGTEINHSIAE |
| | | | DKIAGVDITDVDAVIDLSVKLCGTISSEISDYFKDDEVYAEYI |
| | | | SSYLDFEYDGGNYKDSLNRFCNSDAVNDQKVALYYDGEHP |
| | | | KLNRNIILSKLYGERRFLEKITDRVSRSDIVEYYKLKKETSQY |
| | | | QTKGIFDSEDEQKNIKKFQEMKNIVEFRDLMDYSEIADELQG |
| | | | QLINWIYLRERDLMNFQLGYHYACLNNDSNKQATYVTLDY |
| | | | QGKKNRKINGAILYQICAMYINGLPLYYVDKDSSEWTVSDG |
| | | | KESTGAKIGEFYRYAKSFENTSDCYASGLEIFENISEHDNITEL |
| | | | RNYIEHFRYYSSFDRSFLGIYSEVFDRFFTYDLKYRKNVPTIL |
| | | | YNILLQHFVNVRFEFVSGKKMIGIDKKDRKIAKEKECARITIR |
| | | | EKNGVYSEQFTYKLKNGTVYVDARDKRYLQSIIRLLFYPEK |
| | | | VNMDEMIEVKEKKKPSDNNTGKGYSKRDRQQDRKEYDKY |
| | | | KEKKKKEGNFLSGMGGNINWDEINAQLKN |
| c2c2-7 | 3 | [Clostridium] | MKFSKVDHTRSAVGIQKATDSVHGMLYTDPKKQEVNDLDK |
| | | aminophilum | RFDQLNVKAKRLYNVFNQSKAEEDDDEKRFGKVVKKLNRE |
| | | DSM 10710 | LKDLLFHREVSRYNSIGNAKYNYYGIKSNPEEIVSNLGMVES |
| | | SEQ ID | LKGERDPQKVISKLLLYYLRKGLKPGTDGLRMILEASCGLRK |
| | | No. 195) | LSGDEKELKVFLQTLDEDFEKKTFKKNLIRSIENQNMAVQPS |
| | | | NEGDPIIGITQGRFNSQKNEEKSAIERMMSMYADLNEDHRED |
| | | | VLRKLRRLNVLYFNVDTEKTEEPTLPGEVDTNPVFEVWHDH |
| | | | EKGKENDRQFATFAKILTEDRETRKKEKLAVKEALNDLKSAI |
| | | | RDHNIMAYRCSIKVTEQDKDGLFFEDQRINRFWIHHIESAVE |
| | | | RILASINPEKLYKLRIGYLGEKVWKDLLNYLSIKYIAVGKAV |
| | | | FHFAMEDLGKTGQDIELGKLSNSVSGGLTSFDYEQIRADETL |
| | | | QRQLSVEVAFAANNLFRAVVGQTGKKIEQSKSEENEEDFLL |
| | | | WKAEKIAESIKKEGEGNTLKSILQFFGGASSWDLNHFCAAYG |
| | | | NESSALGYETKFADDLRKAIYSLRNETFHFTTLNKGSFDWNA |
| | | | KLIGDMFSHEAATGIAVERTRFYSNNLPMFYRESDLKRIMDH |
| | | | LYNTYHPRASQVPSFNSVFVRKNFRLFLSNTLNTNTSFDTEV |
| | | | YQKWESGVYYLFKEIYYNSFLPSGDAHHLFFEGLRRIRKEAD |
| | | | NLPIVGKEAKKRNAVQDFGRRCDELKNLSLSAICQMIMTEY |
| | | | NEQNNGNRKVKSTREDKRKPDIFQHYKMLLLRTLQEAFAIYI |
| | | | RREEFKFIFDLPKTLYVMKPVEEFLPNWKSGMFDSLVERVK |
| | | | QSPDLQRWYVLCKFLNGRLLNQLSGVIRSYIQFAGDIQRRAK |
| | | | ANHNRLYMDNTQRVEYYSNVLEVVDFCIKGTSRFSNVFSDY |
| | | | FRDEDAYADYLDNYLQFKDEKIAEVSSFAALKTFCNEEEVK |
| | | | AGIYMDGENPVMQRNIVMAKLFGPDEVLKNVVPKVTREEIE |
| | | | EYYQLEKQIAPYRQNGYCKSEEDQKKLLRFQRIKNRVEFQTI |
| | | | TEFSEIINELLGQLISWSFLRERDLLYFQLGFHYLCLHNDTEK |
| | | | PAEYKEISREDGTVIRNAILHQVAAMYVGGLPVYTLADKKL |
| | | | AAFEKGEADCKLSISKDTAGAGKKIKDFFRYSKYVLIKDRML |
| | | | TDQNQKYTIYLAGLELFENTDEHDNITDVRKYVDHFKYYAT |
| | | | SDENAMSILDLYSEIHDRFFTYDMKYQKNVANMLENILLRH |
| | | | FVLIRPEFFTGSKKVGEGKKITCKARAQIEIAENGMRSEDFTY |
| | | | KLSDGKKNISTCMIAARDQKYLNTVARLLYYPHEAKKSIVD |
| | | | TREKKNNKKTNRGDGTFNKQKGTARKEKDNGPREFNDTGF |
| | | | SNTPFAGFDPFRNS |
| c2c2-8 | 5 | Carnobacterium | MRITKVKIKLDNKLYQVTMQKEEKYGTLKLNEESRKSTAEIL |
| | | gallinarum | RLKKASFNKSFHSKTINSQKENKNATIKKNGDYISQIFEKLVG |
| | | DSM 4847 | VDTNKNIRKPKMSLTDLKDLPKKDLALFIKRKFKNDDIVEIK |
| | | (SEQ ID | NLDLISLFYNALQKVPGEHFTDESWADFCQEMMPYREYKNK |
| | | No. 196) | FIERKIILLANSIEQNKGFSINPETFSKRKRVLHQWAIEVQERG |
| | | | DFSILDEKLSKLAEIYNFKKMCKRVQDELNDLEKSMKKGKN |
| | | | PEKEKEAYKKQKNFKIKTIWKDYPYKTHIGLIEKIKENEELN |
| | | | QFNIEIGKYFEHYFPIKKERCTEDEPYYLNSETIATTVNYQLK |
| | | | NALISYLMQIGKYKQFGLENQVLDSKKLQEIGIYEGFQTKFM |
| | | | DACVFATSSLKNIIEPMRSGDILGKREFKEAIATSSFVNYHHF |
| | | | FPYFPFELKGMKDRESELIPFGEQTEAKQMQNIWALRGSVQQ |
| | | | IRNEIFHSFDKNQKFNLPQLDKSNFEFDASENSTGKSQSYIET |
| | | | DYKFLFEAEKNQLEQFFIERIKSSGALEYYPLKSLEKLFAKKE |
| | | | MKFSLGSQVVAFAPSYKKLVKKGHSYQTATEGTANYLGLS |
| | | | YYNRYELKEESFQAQYYLLKLIYQYVFLPNFSQGNSPAFRET |
| | | | VKAILRINKDEARKKMKKNKKFLRKYAFEQVREMEFKETPD |
| | | | QYMSYLQSEMREEKVRKAEKNDKGFEKNITMNFEKLLMQIF |
| | | | VKGFDVFLTTFAGKELLLSSEEKVIKETEISLSKKINEREKTLK |
| | | | ASIQVEHQLVATNSAISYWLFCKLLDSRHLNELRNEMIKFKQ |
| | | | SRIKFNHTQHAELIQNLLPIVELTILSNDYDEKNDSQNVDVSA |
| | | | YFEDKSLYETAPYVQTDDRTRVSFRPILKLEKYHTKSLIEALL |
| | | | KDNPQFRVAATDIQEWMHKREEIGELVEKRKNLHTEWAEG |
| | | | QQTLGAEKREEYRDYCKKIDRFNWKANKVTLTYLSQLHYLI |
| | | | TDLLGRMVGFSALFERDLVYFSRSFSELGGETYHISDYKNLS |
| | | | GVLRLNAEVKPIKIKNIKVIDNEENPYKGNEPEVKPFLDRLH |
| | | | AYLENVIGIKAVHGKIRNQTAHLSVLQLELSMIESMNNLRDL |
| | | | MAYDRKLKNAVTKSMIKILDKHGMILKLKIDENHKNFEIESL |
| | | | IPKEIIHLKDKAIKTNQVSEEYCQLVLALLTTNPGNQLN |
| c2c2-9 | 6 | Carnobacterium | MRMTKVKINGSPVSMNRSKLNGHLVWNGTTNTVNILTKKE |
| | | gallinarum | QSFAASFLNKTLVKADQVKGYKVLAENIFIIFEQLEKSNSEKP |
| | | DSM 4847 | SVYLNNIRRLKEAGLKRFFKSKYHEEIKYTSEKNQSVPTKLN |
| | | (SEQ ID | LIPLFFNAVDRIQEDKFDEKNWSYFCKEMSPYLDYKKSYLNR |
| | | No. 197) | KKEILANSIQQNRGFSMPTAEEPNLLSKRKQLFQQWAMKFQ |
| | | | ESPLIQQNNFAVEQFNKEFANKINELAAVYNVDELCTAITEK |
| | | | LMNFDKDKSNKTRNFEIKKLWKQHPHNKDKALIKLFNQEG |
| | | | NEALNQFNIELGKYFEHYFPKTGKKESAESYYLNPQTIIKTVG |
| | | | YQLRNAFVQYLLQVGKLHQYNKGVLDSQTLQEIGMYEGFQ |
| | | | TKFMDACVFASSSLRNIIQATTNEDILTREKFKKELEKNVELK |
| | | | HDLFFKTEIVEERDENPAKKIAMTPNELDLWAIRGAVQRVR |
| | | | NQIFHQQINKRHEPNQLKVGSFENGDLGNVSYQKTIYQKLFD |
| | | | AEIKDIEIYFAEKIKSSGALEQYSMKDLEKLFSNKELTLSLGG |
| | | | QVVAFAPSYKKLYKQGYFYQNEKTIELEQFTDYDFSNDVFK |
| | | | ANYYLIKLIYHYVFLPQFSQANNKLFKDTVHYVIQQNKELNT |
| | | | TEKDKKNNKKIRKYAFEQVKLMKNESPEKYMQYLQREMQE |
| | | | ERTIKEAKKTNEEKPNYNFEKLLIQIFIKGFDTFLRNFDLNLNP |
| | | | AEELVGTVKEKAEGLRKRKERIAKILNVDEQIKTGDEEIAFW |
| | | | IFAKLLDARHLSELRNEMIKFKQSSVKKGLIKNGDLIEQMQPI |
| | | | LELCILSNDSESMEKESFDKIEVFLEKVELAKNEPYMQEDKL |
| | | | TPVKFRFMKQLEKYQTRNFIENLVIENPEFKVSEKIVLNWHE |
| | | | EKEKIADLVDKRTKLHEEWASKAREIEEYNEKIKKNKSKKL |
| | | | DKPAEFAKFAEYKIICEAIENFNRLDHKVRLTYLKNLHYLMI |
| | | | DLMGRMVGFSVLFERDFVYMGRSYSALKKQSIYLNDYDTF |
| | | | ANIRDWEVNENKHLFGTSSSDLTFQETAEFKNLKKPMENQL |
| | | | KALLGVTNHSFEIRNNIAHLHVLRNDGKGEGVSLLSCMNDL |
| | | | RKLMSYDRKLKNAVTKAIIKILDKHGMILKLTNNDHTKPFEI |
| | | | ESLKPKKIIHLEKSNHSFPMDQVSQEYCDLVKKMLVFTN |
| c2c2- | 7 | Paludibacter | MRVSKVKVKDGGKDKMVLVHRKTTGAQLVYSGQPVSNET |
| 10 | | propionicigenes | SNILPEKKRQSFDLSTLNKTIIKFDTAKKQKLNVDQYKIVEKI |
| | | WB4 | FKYPKQELPKQIKAEEILPFLNHKFQEPVKWKNGKEESFNL |
| | | (SEQ ID | TLLIVEAVQAQDKRKLQPYYDWKTWYIQTKSDLLKKSIENN |
| | | No. 198) | RIDLTENLSKRKKALLAWETEFTASGSIDLTHYHKVYMTDV |
| | | | LCKMLQDVKPLTDDKGKINTNAYHRGLKKALQNHQPAIFGT |
| | | | REVPNEANRADNQLSIYHLEVVKYLEHYFPIKTSKRRNTADD |
| | | | IAHYLKAQTLKTTIEKQLVNAIRANIIQQGKTNHHELKADTT |
| | | | SNDLIRIKTNEAFVLNLTGTCAFAANNIRNMVDNEQTNDILG |
| | | | KGDFIKSLLKDNTNSQLYSFFFGEGLSTNKAEKETQLWGIRG |
| | | | AVQQIRNNVNHYKKDALKTVFNISNFENPTITDPKQQTNYA |
| | | | DTIYKARFINELEKIPEAFAQQLKTGGAVSYYTIENLKSLLTT |
| | | | FQFSLCRSTIPFAPGFKKVFNGGINYQNAKQDESFYELMLEQ |
| | | | YLRKENFAEESYNARYFMLKLIYNNLFLPGFTTDRKAFADSV |
| | | | GFVQMQNKKQAEKVNPRKKEAYAFEAVRPMTAADSIADY |
| | | | MAYVQSELMQEQNKKEEKVAEETRINFEKFVLQVFIKGFDS |
| | | | FLRAKEFDFVQMPQPQLTATASNQQKADKLNQLEASITADC |
| | | | KLTPQYAKADDATHIAFYVFCKLLDAAHLSNLRNELIKFRES |
| | | | VNEFKFHHLLEIIEICLLSADVVPTDYRDLYSSEADCLARLRP |
| | | | FIEQGADITNWSDLFVQSDKHSPVIHANIELSVKYGTTKLLEQ |
| | | | IINKDTQFKTTEANFTAWNTAQKSIEQLIKQREDHHEQWVK |
| | | | AKNADDKEKQERKREKSNFAQKFIEKHGDDYLDICDYINTY |
| | | | NWLDNKMHFVHLNRLHGLTIELLGRMAGFVALFDRDFQFF |
| | | | DEQQIADEFKLHGFVNLHSIDKKLNEVPTKKIKEIYDIRNKIIQ |
| | | | INGNKINESVRANLIQFISSKRNYYNNAFLHVSNDEIKEKQM |
| | | | YDIRNHIAHFNYLTKDAADFSLIDLINELRELLHYDRKLKNA |
| | | | VSKAFIDLFDKHGMILKLKLNADHKLKVESLEPKKIYHLGSS |
| | | | AKDKPEYQYCTNQVMMAYCNMCRSLLEMKK |
| c2c2- | 9 | Listeria | MLALLHQEVPSQKLHNLKSLNTESLTKLFKPKFQNMISYPPS |
| 11 | | weihenstephanensis | KGAEHVQFCLTDIAVPAIRDLDEIKPDWGIFFEKLKPYTDWA |
| | | FSL R9- | ESYIHYKQTTIQKSIEQNKIQSPDSPRKLVLQKYVTAFLNGEP |
| | | 0317 (SEQ | LGLDLVAKKYKLADLAESFKVVDLNEDKSANYKIKACLQQ |
| | | ID No. 199) | HQRNILDELKEDPELNQYGIEVKKYIQRYFPIKRAPNRSKHA |
| | | | RADFLKKELIESTVEQQFKNAVYHYVLEQGKMEAYELTDPK |
| | | | TKDLQDIRSGEAFSFKFINACAFASNNLKMILNPECEKDILGK |
| | | | GDFKKNLPNSTTQSDVVKKMIPFFSDEIQNVNFDEAIWAIRG |
| | | | SIQQIRNEVYHCKKHSWKSILKIKGFEFEPNNMKYTDSDMQK |
| | | | LMDKDIAKIPDFIEEKLKSSGIIRFYSHDKLQSIWEMKQGFSL |
| | | | LTTNAPFVPSFKRVYAKGHDYQTSKNRYYDLGLTTFDILEY |
| | | | GEEDFRARYFLTKLVYYQQFMPWFTADNNAFRDAANFVLR |
| | | | LNKNRQQDAKAFINIREVEEGEMPRDYMGYVQGQIAIHEDS |
| | | | TEDTPNHFEKFISQVFIKGFDSHMRSADLKFIKNPRNQGLEQS |
| | | | EIEEMSFDIKVEPSFLKNKDDYIAFWTFCKMLDARHLSELRN |
| | | | EMIKYDGHLTGEQEIIGLALLGVDSRENDWKQFFSSEREYEK |
| | | | IMKGYVGEELYQREPYRQSDGKTPILFRGVEQARKYGTETVI |
| | | | QRLFDASPEFKVSKCNITEWERQKETIEETIERRKELHNEWE |
| | | | KNPKKPQNNAFFKEYKECCDAIDAYNWHKNKTTLVYVNEL |
| | | | HHLLIEILGRYVGYVAIADRDFQCMANQYFKHSGITERVEY |
| | | | WGDNRLKSIKKLDTFLKKEGLFVSEKNARNHIAHLNYLSLK |
| | | | SECTLLYLSERLREIFKYDRKLKNAVSKSLIDILDRHGMSVVF |
| | | | ANLKENKHRLVIKSLEPKKLRHLGEKKIDNGYIETNQVSEEY |
| | | | CGIVKRLLEI |
| c2c2- | 10 | Listeriaceae | MKITKMRVDGRTIVMERTSKEGQLGYEGIDGNKTTEIIFDKK |
| 12 | | bacterium | KESFYKSILNKTVRKPDEKEKNRRKQAINKAINKEITELMLA |
| | | FSL M6- | VLHQEVPSQKLHNLKSLNTESLTKLFKPKFQNMISYPPSKGA |
| | | 0635 = | EHVQFCLTDIAVPAIRDLDEIKPDWGIFFEKLKPYTDWAESYI |
| | | Listeria | HYKQTTIQKSIEQNKIQSPDSPRKLVLQKYVTAFLNGEPLGL |
| | | newyorkensis FSL | DLVAKKYKLADLAESFKLVDLNEDKSANYKIKACLQQHQR |
| | | M6-0635 | NILDELKEDPELNQYGIEVKKYIQRYFPIKRAPNRSKHARADF |
| | | (SEQ ID | LKKELIESTVEQQFKNAVYHYVLEQGKMEAYELTDPKTKDL |
| | | No. 200) | QDIRSGEAFSFKFINACAFASNNLKMILNPECEKDILGKGNFK |
| | | | KNLPNSTTRSDVVKKMIPFFSDELQNVNFDEAIWAIRGSIQQI |
| | | | RNEVYHCKKHSWKSILKIKGFEFEPNNMKYADSDMQKLMD |
| | | | KDIAKIPEFIEEKLKSSGVVRFYRHDELQSIWEMKQGFSLLTT |
| | | | NAPFVPSFKRVYAKGHDYQTSKNRYYNLDLTTFDILEYGEE |
| | | | DFRARYFLTKLVYYQQFMPWFTADNNAFRDAANFVLRLNK |
| | | | NRQQDAKAFINIREVEEGEMPRDYMGYVQGQIAIHEDSIEDT |
| | | | PNHFEKFISQVFIKGFDRHMRSANLKFIKNPRNQGLEQSEIEE |
| | | | MSFDIKVEPSFLKNKDDYIAFWIFCKMLDARHLSELRNEMIK |
| | | | YDGHLTGEQEIIGLALLGVDSRENDWKQFFSSEREYEKIMKG |
| | | | YVVEELYQREPYRQSDGKTPILFRGVEQARKYGTETVIQRLF |
| | | | DANPEFKVSKCNLAEWERQKETIEETIKRRKELHNEWAKNP |
| | | | KKPQNNAFFKEYKECCDAIDAYNWHKNKTTLAYVNELHHL |
| | | | LIEILGRYVGYVAIADRDFQCMANQYFKHSGITERVEYWGD |
| | | | NRLKSIKKLDTFLKKEGLFVSEKNARNHIAHLNYLSLKSECT |
| | | | LLYLSERLREIFKYDRKLKNAVSKSLIDILDRHGMSVVFANL |
| | | | KENKHRLVIKSLEPKKLRHLGGKKIDGGYIETNQVSEEYCGI |
| | | | VKRLLEM |
| c2c2- | 12 | Leptotrichia | MKVTKVDGISHKKYIEEGKLVKSTSEENRTSERLSELLSIRLD |
| 13 | | wadei | IYIKNPDNASEEENRIRRENLKKFFSNKVLHLKDSVLYLKNR |
| | | F0279 | KEKNAVQDKNYSEEDISEYDLKNKNSFSVLKKILLNEDVNSE |
| | | (SEQ ID | ELEIFRKDVEAKLNKINSLKYSFEENKANYQKINENNVEKVG |
| | | No. 201) | GKSKRNIIYDYYRESAKRNDYINNVQEAFDKLYKKEDIEKLF |
| | | | FLIENSKKHEKYKIREYYHKIIGRKNDKENFAKIIYEEIQNVN |
| | | | NIKELIEKIPDMSELKKSQVFYKYYLDKEELNDKNIKYAFCH |
| | | | FVEIEMSQLLKNYVYKRLSNISNDKIKRIFEYQNLKKLIENKL |
| | | | LNKLDTYVRNCGKYNYYLQVGEIATSDFIARNRQNEAFLRNI |
| | | | IGVSSVAYFSLRNILETENENDITGRMRGKTVKNNKGEEKYV |
| | | | SGEVDKIYNENKQNEVKENLKMFYSYDFNMDNKNEIEDFFA |
| | | | NIDEAISSIRHGIVHFNLELEGKDIFAFKNIAPSEISKKMFQNEI |
| | | | NEKKLKLKIFKQLNSANVFNYYEKDVIIKYLKNTKFNFVNK |
| | | | NIPFVPSFTKLYNKIEDLRNTLKFFWSVPKDKEEKDAQIYLLK |
| | | | NIYYGEFLNKFVKNSKVFFKITNEVIKINKQRNQKTGHYKYQ |
| | | | KFENIEKTVPVEYLAIIQSREMINNQDKEEKNTYIDFIQQIFLK |
| | | | GFIDYLNKNNLKYIESNNNNDNNDIFSKIKIKKDNKEKYDKIL |
| | | | KNYEKHNRNKEIPHEINEFVREIKLGKILKYTENLNMFYLILK |
| | | | LLNHKELTNLKGSLEKYQSANKEETFSDELELINLLNLDNNR |
| | | | VTEDFELEANEIGKFLDFNENKIKDRKELKKFDTNKIYFDGE |
| | | | NIIKHRAFYNIKKYGMLNLLEKIADKAKYKISLKELKEYSNK |
| | | | KNEIEKNYTMQQNLHRKYARPKKDEKFNDEDYKEYEKAIG |
| | | | NIQKYTHLKNKVEFNELNLLQGLLLKILHRLVGYTSIWERDL |
| | | | RFRLKGEFPENHYIEEIFNFDNSKNVKYKSGQIVEKYINFYKE |
| | | | LYKDNVEKRSIYSDKKVKKLKQEKKDLYIRNYIAHFNYIPHA |
| | | | EISLLEVLENLRKLLSYDRKLKNAIMKSIVDILKEYGFVATFK |
| | | | IGADKKIEIQTLESEKIVHLKNLKKKKLMTDRNSEELCELVK |
| | | | VMFEYKALE |
| c2c2- | 15 | Rhodobacter | MQIGKVQGRTISEFGDPAGGLKRKISTDGKNRKELPAHLSSD |
| 14 | | capsulatus | PKALIGQWISGIDKIYRKPDSRKSDGKAIHSPTPSKMQFDARD |
| | | SB 1003 | DLGEAFWKLVSEAGLAQDSDYDQFKRRLHPYGDKFQPADS |
| | | (SEQ ID | GAKLKFEADPPEPQAFHGRWYGAMSKRGNDAKELAAALYE |
| | | No. 202) | HLHVDEKRIDGQPKRNPKTDKFAPGLVVARALGIESSVLPRG |
| | | | MARLARNWGEEEIQTYFVVDVAASVKEVAKAAVSAAQAFD |
| | | | PPRQVSGRSLSPKVGFALAEHLERVTGSKRCSFDPAAGPSVL |
| | | | ALHDEVKKTYKRLCARGKNAARAFPADKTELLALMRHTHE |
| | | | NRVRNQMVRMGRVSEYRGQQAGDLAQSHYWTSAGQTEIK |
| | | | ESEIFVRLWVGAFALAGRSMKAWIDPMGKIVNTEKNDRDLT |
| | | | AAVNIRQVISNKEMVAEAMARRGIYFGETPELDRLGAEGNE |
| | | | GFVFALLRYLRGCRNQTFHLGARAGFLKEIRKELEKTRWGK |
| | | | AKEAEHVVLTDKTVAAIRAIIDNDAKALGARLLADLSGAFV |
| | | | AHYASKEHFSTLYSEIVKAVKDAPEVSSGLPRLKLLLKRADG |
| | | | VRGYVHGLRDTRKHAFATKLPPPPAPRELDDPATKARYIALL |
| | | | RLYDGPFRAYASGITGTALAGPAARAKEAATALAQSVNVTK |
| | | | AYSDVMEGRTSRLRPPNDGETLREYLSALTGETATEFRVQIG |
| | | | YESDSENARKQAEFIENYRRDMLAFMFEDYIRAKGFDWILKI |
| | | | EPGATAMTRAPVLPEPIDTRGQYEHWQAALYLVMHFVPASD |
| | | | VSNLLHQLRKWEALQGKYELVQDGDATDQADARREALDL |
| | | | VKRFRDVLVLFLKTGEARFEGRAAPFDLKPFRALFANPATFD |
| | | | RLFMATPTTARPAEDDPEGDGASEPELRVARTLRGLRQIARY |
| | | | NHMAVLSDLFAKHKVRDEEVARLAEIEDETQEKSQIVAAQE |
| | | | LRTDLHDKVMKCHPKTISPEERQSYAAAIKTIEEHRFLVGRV |
| | | | YLGDHLRLHRLMMDVIGRLIDYAGAYERDTGTFLINASKQL |
| | | | GAGADWAVTIAGAANTDARTQTRKDLAHFNVLDRADGTPD |
| | | | LTALVNRAREMMAYDRKRKNAVPRSILDMLARLGLTLKWQ |
| | | | MKDHLLQDATITQAAIKHLDKVRLTVGGPAAVTEARFSQDY |
| | | | LQMVAAVFNGSVQNPKPRRRDDGDAWHKPPKPATAQSQPD |
| | | | QKPPNKAPSAGSRLPPPQVGEVYEGVVVKVIDTGSLGFLAVE |
| | | | GVAGNIGLHISRLRRIREDAIIVGRRYRFRVEIYVPPKSNTSKL |
| | | | NAADLVRID |
| c2c2- | 16 | Rhodobacter | MQIGKVQGRTISEFGDPAGGLKRKISTDGKNRKELPAHLSSD |
| 15 | | capsulatus | PKALIGQWISGIDKIYRKPDSRKSDGKAIHSPTPSKMQFDARD |
| | | R121 (SEQ | DLGEAFWKLVSEAGLAQDSDYDQFKRRLHPYGDKFQPADS |
| | | ID No. 203) | GAKLKFEADPPEPQAFHGRWYGAMSKRGNDAKELAAALYE |
| | | | HLHVDEKRIDGQPKRNPKTDKFAPGLVVARALGIESSVLPRG |
| | | | MARLARNWGEEEIQTYFVVDVAASVKEVAKAAVSAAQAFD |
| | | | PPRQVSGRSLSPKVGFALAEHLERVTGSKRCSFDPAAGPSVL |
| | | | ALHDEVKKTYKRLCARGKNAARAFPADKTELLALMRHTHE |
| | | | NRVRNQMVRMGRVSEYRGQQAGDLAQSHYWTSAGQTEIK |
| | | | ESEIFVRLWVGAFALAGRSMKAWIDPMGKIVNTEKNDRDLT |
| | | | AAVNIRQVISNKEMVAEAMARRGIYFGETPELDRLGAEGNE |
| | | | GFVFALLRYLRGCRNQTFHLGARAGFLKEIRKELEKTRWGK |
| | | | AKEAEHVVLTDKTVAAIRAIIDNDAKALGARLLADLSGAFV |
| | | | AHYASKEHFSTLYSEIVKAVKDAPEVSSGLPRLKLLLKRADG |
| | | | VRGYVHGLRDTRKHAFATKLPPPPAPRELDDPATKARYIALL |
| | | | RLYDGPFRAYASGITGTALAGPAARAKEAATALAQSVNVTK |
| | | | AYSDVMEGRSSRLRPPNDGETLREYLSALTGETATEFRVQIG |
| | | | YESDSENARKQAEFIENYRRDMLAFMFEDYIRAKGFDWILKI |
| | | | EPGATAMTRAPVLPEPIDTRGQYEHWQAALYLVMHFVPASD |
| | | | VSNLLHQLRKWEALQGKYELVQDGDATDQADARREALDL |
| | | | VKRFRDVLVLFLKTGEARFEGRAAPFDLKPFRALFANPATFD |
| | | | RLFMATPTTARPAEDDPEGDGASEPELRVARTLRGLRQIARY |
| | | | NHMAVLSDLFAKHKVRDEEVARLAEIEDETQEKSQIVAAQE |
| | | | LRTDLHDKVMKCHPKTISPEERQSYAAAIKTIEEHRFLVGRV |
| | | | YLGDHLRLHRLMMDVIGRLIDYAGAYERDTGTFLINASKQL |
| | | | GAGADWAVTIAGAANTDARTQTRKDLAHFNVLDRADGTPD |
| | | | LTALVNRAREMMAYDRKRKNAVPRSILDMLARLGLTLKWQ |
| | | | MKDHLLQDATITQAAIKHLDKVRLTVGGPAAVTEARFSQDY |
| | | | LQMVAAVFNGSVQNPKPRRRDDGDAWHKPPKPATAQSQPD |
| | | | QKPPNKAPSAGSRLPPPQVGEVYEGVVVKVIDTGSLGFLAVE |
| | | | GVAGNIGLHISRLRRIREDAIIVGRRYRFRVEIYVPPKSNTSKL |
| | | | NAADLVRID |
| c2c2- | 17 | Rhodobacter | MQIGKVQGRTISEFGDPAGGLKRKISTDGKNRKELPAHLSSD |
| 16 | | capsulatus | PKALIGQWISGIDKIYRKPDSRKSDGKAIHSPTPSKMQFDARD |
| | | DE442 | DLGEAFWKLVSEAGLAQDSDYDQFKRRLHPYGDKFQPADS |
| | | (SEQ ID | GAKLKFEADPPEPQAFHGRWYGAMSKRGNDAKELAAALYE |
| | | No. 204) | HLHVDEKRIDGQPKRNPKTDKFAPGLVVARALGIESSVLPRG |
| | | | MARLARNWGEEEIQTYFVVDVAASVKEVAKAAVSAAQAFD |
| | | | PPRQVSGRSLSPKVGFALAEHLERVTGSKRCSFDPAAGPSVL |
| | | | ALHDEVKKTYKRLCARGKNAARAFPADKTELLALMRHTHE |
| | | | NRVRNQMVRMGRVSEYRGQQAGDLAQSHYWTSAGQTEIK |
| | | | ESEIFVRLWVGAFALAGRSMKAWIDPMGKIVNTEKNDRDLT |
| | | | AAVNIRQVISNKEMVAEAMARRGIYFGETPELDRLGAEGNE |
| | | | GFVFALLRYLRGCRNQTFHLGARAGFLKEIRKELEKTRWGK |
| | | | AKEAEHVVLTDKTVAAIRAIIDNDAKALGARLLADLSGAFV |
| | | | AHYASKEHFSTLYSEIVKAVKDAPEVSSGLPRLKLLLKRADG |
| | | | VRGYVHGLRDTRKHAFATKLPPPPAPRELDDPATKARYIALL |
| | | | RLYDGPFRAYASGITGTALAGPAARAKEAATALAQSVNVTK |
| | | | AYSDVMEGRSSRLRPPNDGETLREYLSALTGETATEFRVQIG |
| | | | YESDSENARKQAEFIENYRRDMLAFMFEDYIRAKGFDWILKI |
| | | | EPGATAMTRAPVLPEPIDTRGQYEHWQAALYLVMHFVPASD |
| | | | VSNLLHQLRKWEALQGKYELVQDGDATDQADARREALDL |
| | | | VKRFRDVLVLFLKTGEARFEGRAAPFDLKPFRALFANPATFD |
| | | | RLFMATPTTARPAEDDPEGDGASEPELRVARTLRGLRQIARY |
| | | | NHMAVLSDLFAKHKVRDEEVARLAEIEDETQEKSQIVAAQE |
| | | | LRTDLHDKVMKCHPKTISPEERQSYAAAIKTIEEHRFLVGRV |
| | | | YLGDHLRLHRLMMDVIGRLIDYAGAYERDTGTFLINASKQL |
| | | | GAGADWAVTIAGAANTDARTQTRKDLAHFNVLDRADGTPD |
| | | | LTALVNRAREMMAYDRKRKNAVPRSILDMLARLGLTLKWQ |
| | | | MKDHLLQDATITQAAIKHLDKVRLTVGGPAAVTEARFSQDY |
| | | | LQMVAAVFNGSVQNPKPRRRDDGDAWHKPPKPATAQSQPD |
| | | | QKPPNKAPSAGSRLPPPQVGEVYEGVVVKVIDTGSLGFLAVE |
| | | | GVAGNIGLHISRLRRIREDAIIVGRRYRFRVEIYVPPKSNTSKL |
| | | | NAADLVRID |
| c2c2-2 | | (SEQ ID | MGNLFGHKRWYEVRDKKDFKIKRKVKVKRNYDGNKYILNI |
| | | No. 205) | NENNNKEKIDNNKFIRKYINYKKNDNILKEFTRKFHAGNILF |
| | | | KLKGKEGIIRIENNDDFLETEEVVLYIEAYGKSEKLKALGITK |
| | | | KKIIDEAIRQGITKDDKKIEIKRQENEEEIEIDIRDEYTNKTLND |
| | | | CSIILRIIENDELETKKSIYEIFKNINMSLYKIIEKIIENETEKVFE |
| | | | NRYYEEHLREKLLKDDKIDVILTNFMEIREKIKSNLEILGFVK |
| | | | FYLNVGGDKKKSKNKKMLVEKILNINVDLTVEDIADFVIKEL |
| | | | EFWNITKRIEKVKKVNNEFLEKRRNRTYIKSYVLLDKHEKFK |
| | | | IERENKKDKIVKFFVENIKNNSIKEKIEKILAEFKIDELIKKLEK |
| | | | ELKKGNCDTEIFGIFKKHYKVNFDSKKFSKKSDEEKELYKIIY |
| | | | RYLKGRIEKILVNEQKVRLKKMEKIEIEKILNESILSEKILKRV |
| | | | KQYTLEHIMYLGKLRHNDIDMTTVNTDDFSRLHAKEELDLE |
| | | | LITFFASTNMELNKIFSRENINNDENIDFFGGDREKNYVLDKK |
| | | | ILNSKIKIIRDLDFIDNKNNITNNFIRKFTKIGTNERNRILHAISK |
| | | | ERDLQGTQDDYNKVINIIQNLKISDEEVSKALNLDVVFKDKK |
| | | | NIITKINDIKISEENNNDIKYLPSFSKVLPEILNLYRNNPKNEPF |
| | | | DTIETEKIVLNALIYVNKELYKKLILEDDLEENESKNIFLQELK |
| | | | KTLGNIDEIDENIIENYYKNAQISASKGNNKAIKKYQKKVIEC |
| | | | YIGYLRKNYEELFDFSDFKMNIQEIKKQIKDINDNKTYERITV |
| | | | KTSDKTIVINDDFEYIISIFALLNSNAVINKIRNRFFATSVWLN |
| | | | TSEYQNIIDILDEIMQLNTLRNECITENWNLNLEEFIQKMKEIE |
| | | | KDFDDFKIQTKKEIFNNYYEDIKNNILTEFKDDINGCDVLEKK |
| | | | LEKIVIFDDETKFEIDKKSNILQDEQRKLSNINKKDLKKKVDQ |
| | | | YIKDKDQEIKSKILCRIIFNSDFLKKYKKEIDNLIEDMESENEN |
| | | | KFQEIYYPKERKNELYIYKKNLFLNIGNPNFDKIYGLISNDIK |
| | | | MADAKFLFNIDGKNIRKNKISEIDAILKNLNDKLNGYSKEYK |
| | | | EKYIKKLKENDDFFAKNIQNKNYKSFEKDYNRVSEYKKIRD |
| | | | LVEFNYLNKIESYLIDINWKLAIQMARFERDMHYIVNGLREL |
| | | | GIIKLSGYNTGISRAYPKRNGSDGFYTTTAYYKFFDEESYKKF |
| | | | EKICYGFGIDLSENSEINKPENESIRNYISHFYIVRNPFADYSIA |
| | | | EQIDRVSNLLSYSTRYNNSTYASVFEVFKKDVNLDYDELKK |
| | | | KFKLIGNNDILERLMKPKKVSVLELESYNSDYIKNLIIELLTKI |
| | | | ENTNDTL |
| c2c2-3 | | L wadei | MKVTKVDGISHKKYIEEGKLVKSTSEENRTSERLSELLSIRLD |
| | | (Lw2) | IYIKNPDNASEEENRIRRENLKKFFSNKVLHLKDSVLYLKNR |
| | | (SEQ ID | KEKNAVQDKNYSEEDISEYDLKNKNSFSVLKKILLNEDVNSE |
| | | No. 206) | ELEIFRKDVEAKLNKINSLKYSFEENKANYQKINENNVEKVG |
| | | | GKSKRNIIYDYYRESAKRNDYINNVQEAFDKLYKKEDIEKLF |
| | | | FLIENSKKHEKYKIREYYHKIIGRKNDKENFAKIIYEEIQNVN |
| | | | NIKELIEKIPDMSELKKSQVFYKYYLDKEELNDKNIKYAFCH |
| | | | FVEIEMSQLLKNYVYKRLSNISNDKIKRIFEYQNLKKLIENKL |
| | | | LNKLDTYVRNCGKYNYYLQVGEIATSDFIARNRQNEAFLRNI |
| | | | IGVSSVAYFSLRNILETENENDITGRMRGKTVKNNKGEEKYV |
| | | | SGEVDKIYNENKQNEVKENLKMFYSYDFNMDNKNEIEDFFA |
| | | | NIDEAISSIRHGIVHFNLELEGKDIFAFKNIAPSEISKKMFQNEI |
| | | | NEKKLKLKIFKQLNSANVFNYYEKDVIIKYLKNTKFNFVNK |
| | | | NIPFVPSFTKLYNKIEDLRNTLKFFWSVPKDKEEKDAQIYLLK |
| | | | NIYYGEFLNKFVKNSKVFFKITNEVIKINKQRNQKTGHYKYQ |
| | | | KFENIEKTVPVEYLAIIQSREMINNQDKEEKNTYIDFIQQIFLK |
| | | | GFIDYLNKNNLKYIESNNNNDNNDIFSKIKIKKDNKEKYDKIL |
| | | | KNYEKHNRNKEIPHEINEFVREIKLGKILKYTENLNMFYLILK |
| | | | LLNHKELTNLKGSLEKYQSANKEETFSDELELINLLNLDNNR |
| | | | VTEDFELEANEIGKFLDFNENKIKDRKELKKFDTNKIYFDGE |
| | | | NIIKHRAFYNIKKYGMLNLLEKIADKAKYKISLKELKEYSNK |
| | | | KNEIEKNYTMQQNLHRKYARPKKDEKFNDEDYKEYEKAIG |
| | | | NIQKYTHLKNKVEFNELNLLQGLLLKILHRLVGYTSIWERDL |
| | | | RFRLKGEFPENHYIEEIFNFDNSKNVKYKSGQIVEKYINFYKE |
| | | | LYKDNVEKRSIYSDKKVKKLKQEKKDLYIRNYIAHFNYIPHA |
| | | | EISLLEVLENLRKLLSYDRKLKNAIMKSIVDILKEYGFVATFK |
| | | | IGADKKIEIQTLESEKIVHLKNLKKKKLMTDRNSEELCELVK |
| | | | VMFEYKALEKRPAATKKAGQAKKKKGSYPYDVPDYAYPY |
| | | | DVPDYAYPYDVPDYA* |
| c2c2-4 | | Listeria | MWISIKTLIHHLGVLFFCDYMYNRREKKIIEVKTMRITKVEV |
| | | seeligeri | DRKKVLISRDKNGGKLVYENEMQDNTEQIMHHKKSSFYKS |
| | | (SEQ ID | VVNKTICRPEQKQMKKLVHGLLQENSQEKIKVSDVTKLNIS |
| | | No. 207) | NFLNHRFKKSLYYFPENSPDKSEEYRIEINLSQLLEDSLKKQQ |
| | | | GTFICWESFSKDMELYINWAENYISSKTKLIKKSIRNNRIQST |
| | | | ESRSGQLMDRYMKDILNKNKPFDIQSVSEKYQLEKLTSALK |
| | | | ATFKEAKKNDKEINYKLKSTLQNHERQIIEELKENSELNQFNI |
| | | | EIRKHLETYFPIKKTNRKVGDIRNLEIGEIQKIVNHRLKNKIVQ |
| | | | RILQEGKLASYEIESTVNSNSLQKIKIEEAFALKFINACLFASN |
| | | | NLRNMVYPVCKKDILMIGEFKNSFKEIKHKKFIRQWSQFFSQ |
| | | | EITVDDIELASWGLRGAIAPIRNEIIHLKKHSWKKFFNNPTFK |
| | | | VKKSKIINGKTKDVTSEFLYKETLFKDYFYSELDSVPELIINK |
| | | | MESSKILDYYSSDQLNQVFTIPNFELSLLTSAVPFAPSFKRVY |
| | | | LKGFDYQNQDEAQPDYNLKLNIYNEKAFNSEAFQAQYSLFK |
| | | | MVYYQVFLPQFTTNNDLFKSSVDFILTLNKERKGYAKAFQDI |
| | | | RKMNKDEKPSEYMSYIQSQLMLYQKKQEEKEKINHFEKFIN |
| | | | QVFIKGFNSFIEKNRLTYICHPTKNTVPENDNIEIPFHTDMDDS |
| | | | NIAFWLMCKLLDAKQLSELRNEMIKFSCSLQSTEEISTFTKAR |
| | | | EVIGLALLNGEKGCNDWKELFDDKEAWKKNMSLYVSEELL |
| | | | QSLPYTQEDGQTPVINRSIDLVKKYGTETILEKLFSSSDDYKV |
| | | | SAKDIAKLHEYDVTEKIAQQESLHKQWIEKPGLARDSAWTK |
| | | | KYQNVINDISNYQWAKTKVELTQVRHLHQLTIDLLSRLAGY |
| | | | MSIADRDFQFSSNYILERENSEYRVTSWILLSENKNKNKYND |
| | | | YELYNLKNASIKVSSKNDPQLKVDLKQLRLTLEYLELFDNRL |
| | | | KEKRNNISHFNYLNGQLGNSILELFDDARDVLSYDRKLKNA |
| | | | VSKSLKEILSSHGMEVTFKPLYQTNHHLKIDKLQPKKIHHLG |
| | | | EKSTVSSNQVSNEYCQLVRTLLTMK |
| C2-17 | | Leptotrichia | MKVTKVGGISHKKYTSEGRLVKSESEENRTDERLSALLNMR |
| | | buccalis | LDMYIKNPSSTETKENQKRIGKLKKFFSNKMVYLKDNTLSL |
| | | C-1013-b | KNGKKENIDREYSETDILESDVRDKKNFAVLKKIYLNENVNS |
| | | (SEQ ID | EELEVFRNDIKKKLNKINSLKYSFEKNKANYQKINENNIEKV |
| | | No. 208) | EGKSKRNIIYDYYRESAKRDAYVSNVKEAFDKLYKEEDIAK |
| | | | LVLEIENLTKLEKYKIREFYHEIIGRKNDKENFAKIIYEEIQNV |
| | | | NNMKELIEKVPDMSELKKSQVFYKYYLDKEELNDKNIKYAF |
| | | | CHFVEIEMSQLLKNYVYKRLSNISNDKIKRIFEYQNLKKLIEN |
| | | | KLLNKLDTYVRNCGKYNYYLQDGEIATSDFIARNRQNEAFL |
| | | | RNIIGVSSVAYFSLRNILETENENDITGRMRGKTVKNNKGEE |
| | | | KYVSGEVDKIYNENKKNEVKENLKMFYSYDFNMDNKNEIE |
| | | | DFFANIDEAISSIRHGIVHFNLELEGKDIFAFKNIAPSEISKKMF |
| | | | QNEINEKKLKLKIFRQLNSANVFRYLEKYKILNYLKRTRFEF |
| | | | VNKNIPFVPSFTKLYSRIDDLKNSLGIYWKTPKTNDDNKTKEI |
| | | | IDAQIYLLKNIYYGEFLNYFMSNNGNFFEISKEIIELNKNDKR |
| | | | NLKTGFYKLQKFEDIQEKIPKEYLANIQSLYMINAGNQDEEE |
| | | | KDTYIDFIQKIFLKGFMTYLANNGRLSLIYIGSDEETNTSLAE |
| | | | KKQEFDKFLKKYEQNNNIKIPYEINEFLREIKLGNILKYTERL |
| | | | NMFYLILKLLNHKELTNLKGSLEKYQSANKEEAFSDQLELIN |
| | | | LLNLDNNRVTEDFELEADEIGKFLDFNGNKVKDNKELKKFD |
| | | | TNKIYFDGENIIKHRAFYNIKKYGMLNLLEKIADKAGYKISIE |
| | | | ELKKYSNKKNEIEKNHKMQENLHRKYARPRKDEKFTDEDY |
| | | | ESYKQAIENIEEYTHLKNKVEFNELNLLQGLLLRILHRLVGY |
| | | | TSIWERDLRFRLKGEFPENQYIEEIFNFENKKNVKYKGGQIVE |
| | | | KYIKFYKELHQNDEVKINKYSSANIKVLKQEKKDLYIRNYIA |
| | | | HFNYIPHAEISLLEVLENLRKLLSYDRKLKNAVMKSVVDILK |
| | | | EYGFVATFKIGADKKIGIQTLESEKIVHLKNLKKKKLMTDRN |
| | | | SEELCKLVKIMFEYKMEEKKSEN |
| C2-18 | | Herbinix | MKLTRRRISGNSVDQKITAAFYRDMSQGLLYYDSEDNDCTD |
| | | hemicellulosilytica | KVIESMDFERSWRGRILKNGEDDKNPFYMFVKGLVGSNDKI |
| | | (SEQ ID | VCEPIDVDSDPDNLDILINKNLTGFGRNLKAPDSNDTLENLIR |
| | | No. 209) | KIQAGIPEEEVLPELKKIKEMIQKDIVNRKEQLLKSIKNNRIPF |
| | | | SLEGSKLVPSTKKMKWLFKLIDVPNKTFNEKMLEKYWEIYD |
| | | | YDKLKANITNRLDKTDKKARSISRAVSEELREYHKNLRTNY |
| | | | NRFVSGDRPAAGLDNGGSAKYNPDKEEFLLFLKEVEQYFKK |
| | | | YFPVKSKHSNKSKDKSLVDKYKNYCSYKVVKKEVNRSIINQ |
| | | | LVAGLIQQGKLLYYFYYNDTWQEDFLNSYGLSYIQVEEAFK |
| | | | KSVMTSLSWGINRLTSFFIDDSNTVKFDDITTKKAKEAIESNY |
| | | | FNKLRTCSRMQDHFKEKLAFFYPVYVKDKKDRPDDDIENLI |
| | | | VLVKNAIESVSYLRNRTFHFKESSLLELLKELDDKNSGQNKI |
| | | | DYSVAAEFIKRDIENLYDVFREQIRSLGIAEYYKADMISDCFK |
| | | | TCGLEFALYSPKNSLMPAFKNVYKRGANLNKAYIRDKGPKE |
| | | | TGDQGQNSYKALEEYRELTWYIEVKNNDQSYNAYKNLLQLI |
| | | | YYHAFLPEVRENEALITDFINRTKEWNRKETEERLNTKNNKK |
| | | | HKNFDENDDITVNTYRYESIPDYQGESLDDYLKVLQRKQMA |
| | | | RAKEVNEKEEGNNNYIQFIRDVVVWAFGAYLENKLKNYKN |
| | | | ELQPPLSKENIGLNDTLKELFPEEKVKSPFNIKCRFSISTFIDNK |
| | | | GKSTDNTSAEAVKTDGKEDEKDKKNIKRKDLLCFYLFLRLL |
| | | | DENEICKLQHQFIKYRCSLKERRFPGNRTKLEKETELLAELEE |
| | | | LMELVRFTMPSIPEISAKAESGYDTMIKKYFKDFIEKKVFKNP |
| | | | KTSNLYYHSDSKTPVTRKYMALLMRSAPLHLYKDIFKGYYL |
| | | | ITKKECLEYIKLSNIIKDYQNSLNELHEQLERIKLKSEKQNGK |
| | | | DSLYLDKKDFYKVKEYVENLEQVARYKHLQHKINFESLYRI |
| | | | FRIHVDIAARMVGYTQDWERDMHFLFKALVYNGVLEERRF |
| | | | EAIFNNNDDNNDGRIVKKIQNNLNNKNRELVSMLCWNKKL |
| | | | NKNEFGAIIWKRNPIAHLNHFTQTEQNSKSSLESLINSLRILLA |
| | | | YDRKRQNAVTKTINDLLLNDYHIRIKWEGRVDEGQIYFNIKE |
| | | | KEDIENEPIIHLKHLHKKDCYIYKNSYMFDKQKEWICNGIKE |
| | | | EVYDKSILKCIGNLFKFDYEDKNKSSANPKHT |
| C2-19 | | [Eubacterium] | MLRRDKEVKKLYNVFNQIQVGTKPKKWNNDEKLSPEENER |
| | | rectale | RAQQKNIKMKNYKWREACSKYVESSQRIINDVIFYSYRKAK |
| | | (SEQ ID | NKLRYMRKNEDILKKMQEAEKLSKFSGGKLEDFVAYTLRKS |
| | | No. 210) | LVVSKYDTQEFDSLAAMVVFLECIGKNNISDHEREIVCKLLE |
| | | | LIRKDFSKLDPNVKGSQGANIVRSVRNQNMIVQPQGDRFLFP |
| | | | QVYAKENETVTNKNVEKEGLNEFLLNYANLDDEKRAESLR |
| | | | KLRRILDVYFSAPNHYEKDMDITLSDNIEKEKFNVWEKHEC |
| | | | GKKETGLFVDIPDVLMEAEAENIKLDAVVEKRERKVLNDRV |
| | | | RKQNIICYRYTRAVVEKYNSNEPLFFENNAINQYWIHHIENA |
| | | | VERILKNCKAGKLFKLRKGYLAEKVWKDAINLISIKYIALGK |
| | | | AVYNFALDDIWKDKKNKELGIVDERIRNGITSFDYEMIKAHE |
| | | | NLQRELAVDIAFSVNNLARAVCDMSNLGNKESDFLLWKRN |
| | | | DIADKLKNKDDMASVSAVLQFFGGKSSWDINIFKDAYKGKK |
| | | | KYNYEVRFIDDLRKAIYCARNENFHFKTALVNDEKWNTELF |
| | | | GKIFERETEFCLNVEKDRFYSNNLYMFYQVSELRNMLDHLY |
| | | | SRSVSRAAQVPSYNSVIVRTAFPEYITNVLGYQKPSYDADTL |
| | | | GKWYSACYYLLKEIYYNSFLQSDRALQLFEKSVKTLSWDDK |
| | | | KQQRAVDNFKDHFSDIKSACTSLAQVCQIYMTEYNQQNNQI |
| | | | KKVRSSNDSIFDQPVYQHYKVLLKKAIANAFADYLKNNKDL |
| | | | FGFIGKPFKANEIREIDKEQFLPDWTSRKYEALCIEVSGSQEL |
| | | | QKWYIVGKFLNARSLNLMVGSMRSYIQYVTDIKRRAASIGN |
| | | | ELHVSVHDVEKVEKWVQVIEVCSLLASRTSNQFEDYFNDKD |
| | | | DYARYLKSYVDFSNVDMPSEYSALVDFSNEEQSDLYVDPKN |
| | | | PKVNRNIVHSKLFAADHILRDIVEPVSKDNIEEFYSQKAEIAY |
| | | | CKIKGKEITAEEQKAVLKYQKLKNRVELRDIVEYGEIINELLG |
| | | | QLINWSFMRERDLLYFQLGFHYDCLRNDSKKPEGYKNIKVD |
| | | | ENSIKDAILYQIIGMYVNGVTVYAPEKDGDKLKEQCVKGGV |
| | | | GVKVSAFHRYSKYLGLNEKTLYNAGLEIFEVVAEHEDIINLR |
| | | | NGIDHFKYYLGDYRSMLSIYSEVFDRFFTYDIKYQKNVLNLL |
| | | | QNILLRHNVIVEPILESGFKTIGEQTKPGAKLSIRSIKSDTFQY |
| | | | KVKGGTLITDAKDERYLETIRKILYYAENEEDNLKKSVVVTN |
| | | | ADKYEKNKESDDQNKQKEKKNKDNKGKKNEETKSDAEKN |
| | | | NNERLSYNPFANLNFKLSN |
| C2-20 | | Eubacteriaceae | MKISKESHKRTAVAVMEDRVGGVVYVPGGSGIDLSNNLKK |
| | | bacterium | RSMDTKSLYNVFNQIQAGTAPSEYEWKDYLSEAENKKREAQ |
| | | CHKCI004 | KMIQKANYELRRECEDYAKKANLAVSRIIFSKKPKKIFSDDDI |
| | | (SEQ ID | ISHMKKQRLSKFKGRMEDFVLIALRKSLVVSTYNQEVFDSR |
| | | No. 211) | KAATVFLKNIGKKNISADDERQIKQLMALIREDYDKWNPDK |
| | | | DSSDKKESSGTKVIRSIEHQNMVIQPEKNKLSLSKISNVGKKT |
| | | | KTKQKEKAGLDAFLKEYAQIDENSRMEYLKKLRRLLDTYFA |
| | | | APSSYIKGAAVSLPENINFSSELNVWERHEAAKKVNINFVEIP |
| | | | ESLLNAEQNNNKINKVEQEHSLEQLRTDIRRRNITCYHFANA |
| | | | LAADERYHTLFFENMAMNQFWIHHMENAVERILKKCNVGT |
| | | | LFKLRIGYLSEKVWKDMLNLLSIKYIALGKAVYHFALDDIW |
| | | | KADIWKDASDKNSGKINDLTLKGISSFDYEMVKAQEDLQRE |
| | | | MAVGVAFSTNNLARVTCKMDDLSDAESDFLLWNKEAIRRH |
| | | | VKYTEKGEILSAILQFFGGRSLWDESLFEKAYSDSNYELKFL |
| | | | DDLKRAIYAARNETFHFKTAAIDGGSWNTRLFGSLFEKEAGL |
| | | | CLNVEKNKFYSNNLVLFYKQEDLRVFLDKLYGKECSRAAQI |
| | | | PSYNTILPRKSFSDFMKQLLGLKEPVYGSAILDQWYSACYYL |
| | | | FKEVYYNLFLQDSSAKALFEKAVKALKGADKKQEKAVESFR |
| | | | KRYWEISKNASLAEICQSYITEYNQQNNKERKVRSANDGMF |
| | | | NEPIYQHYKMLLKEALKMAFASYIKNDKELKFVYKPTEKLF |
| | | | EVSQDNFLPNWNSEKYNTLISEVKNSPDLQKWYIVGKFMNA |
| | | | RMLNLLLGSMRSYLQYVSDIQKRAAGLGENQLHLSAENVG |
| | | | QVKKWIQVLEVCLLLSVRISDKFTDYFKDEEEYASYLKEYV |
| | | | DFEDSAMPSDYSALLAFSNEGKIDLYVDASNPKVNRNIIQAK |
| | | | LYAPDMVLKKVVKKISQDECKEFNEKKEQIIVIQFKNKGDEVS |
| | | | WEEQQKILEYQKLKNRVELRDLSEYGELINELLGQLINWSYL |
| | | | RERDLLYFQLGFHYSCLMNESKKPDAYKTIRRGTVSIENAVL |
| | | | YQIIAMYINGFPVYAPEKGELKPQCKTGSAGQKIRAFCQWAS |
| | | | MVEKKKYELYNAGLELFEVVKEHDNIIDLRNKIDHFKYYQG |
| | | | NDSILALYGEIFDRFFTYDMKYRNNVLNHLQNILLRHNVIIKP |
| | | | IISKDKKEVGRGKMKDRAAFLLEEVSSDRFTYKVKEGERKID |
| | | | AKNRLYLETVRDILYFPNRAVNDKGEDVIICSKKAQDLNEK |
| | | | KADRDKNHDKSKDTNQKKEGKNQEEKSENKEPYSDRMTW |
| | | | KPFAGIKLE |
| C2-21 | | Blautia sp. | MKISKVDHVKSGIDQKLSSQRGMLYKQPQKKYEGKQLEEH |
| | | Marseille- | VRNLSRKAKALYQVFPVSGNSKMEKELQIINSFIKNILLRLDS |
| | | P2398 | GKTSEEIVGYINTYSVASQISGDHIQELVDQHLKESLRKYTCV |
| | | (SEQ ID | GDKRIYVPDIIVALLKSKFNSETLQYDNSELKILIDFIREDYLK |
| | | No. 212) | EKQIKQIVHSIENNSTPLRIAEINGQKRLIPANVDNPKKSYIFE |
| | | | FLKEYAQSDPKGQESLLQHMRYLILLYLYGPDKITDDYCEEI |
| | | | EAWNFGSIVMDNEQLFSEEASMLIQDRIYVNQQIEEGRQSKD |
| | | | TAKVKKNKSKYRMLGDKIEHSINESVVKHYQEACKAVEEK |
| | | | DIPWIKYISDHVMSVYSSKNRVDLDKLSLPYLAKNTWNTWI |
| | | | SFIAMKYVDMGKGVYHFAMSDVDKVGKQDNLIIGQIDPKFS |
| | | | DGISSFDYERIKAEDDLHRSMSGYIAFAVNNFARAICSDEFRK |
| | | | KNRKEDVLTVGLDEIPLYDNVKRKLLQYFGGASNWDDSIIDI |
| | | | IDDKDLVACIKENLYVARNVNFHFAGSEKVQKKQDDILEEIV |
| | | | RKETRDIGKHYRKVFYSNNVAVFYCDEDIIKLMNHLYQREK |
| | | | PYQAQIPSYNKVISKTYLPDLIFMLLKGKNRTKISDPSIMNMF |
| | | | RGTFYFLLKEIYYNDFLQASNLKEMFCEGLKNNVKNKKSEK |
| | | | PYQNFMRRFEELENMGMDFGEICQQIMTDYEQQNKQKKKT |
| | | | ATAVMSEKDKKIRTLDNDTQKYKHFRTLLYIGLREAFIIYLK |
| | | | DEKNKEWYEFLREPVKREQPEEKEFVNKWKLNQYSDCSELI |
| | | | LKDSLAAAWYVVAHFINQAQLNHLIGDIKNYIQFISDIDRRA |
| | | | KSTGNPVSESTEIQIERYRKILRVLEFAKFFCGQITNVLTDYY |
| | | | QDENDFSTHVGHYVKFEKKNMEPAHALQAFSNSLYACGKE |
| | | | KKKAGFYYDGMNPIVNRNITLASMYGNKKLLENAMNPVTE |
| | | | QDIRKYYSLMAELDSVLKNGAVCKSEDEQKNLRHFQNLKN |
| | | | RIELVDVLTLSELVNDLVAQLIGWVYIRERDMMYLQLGLHY |
| | | | IKLYFTDSVAEDSYLRTLDLEEGSIADGAVLYQIASLYSFNLP |
| | | | MYVKPNKSSVYCKKHVNSVATKFDIFEKEYCNGDETVIENG |
| | | | LRLFENINLHKDMVKFRDYLAHFKYFAKLDESILELYSKAYD |
| | | | FFFSYNIKLKKSVSYVLTNVLLSYFINAKLSFSTYKSSGNKTV |
| | | | QHRTTKISVVAQTDYFTYKLRSIVKNKNGVESIENDDRRCEV |
| | | | VNIAARDKEFVDEVCNVINYNSDK |
| C2-22 | | Leptotrichia | MGNLFGHKRWYEVRDKKDFKIKRKVKVKRNYDGNKYILNI |
| | | sp. oral taxon | NENNNKEKIDNNKFIGEFVNYKKNNNVLKEFKRKFHAGNIL |
| | | 879 str. F0557 | FKLKGKEEIIRIENNDDFLETEEVVLYIEVYGKSEKLKALEITK |
| | | (SEQ ID | KKIIDEAIRQGITKDDKKIEIKRQENEEEIEIDIRDEYTNKTLND |
| | | No. 213) | CSIILRIIENDELETKKSIYEIFKNINMSLYKIIEKIIENETEKVFE |
| | | | NRYYEEHLREKLLKDNKIDVILTNFMEIREKIKSNLEIMGFVK |
| | | | FYLNVSGDKKKSENKKMFVEKILNTNVDLTVEDIVDFIVKEL |
| | | | KFWNITKRIEKVKKFNNEFLENRRNRTYIKSYVLLDKHEKFK |
| | | | IERENKKDKIVKFFVENIKNNSIKEKIEKILAEFKINELIKKLEK |
| | | | ELKKGNCDTEIFGIFKKHYKVNFDSKKFSNKSDEEKELYKIIY |
| | | | RYLKGRIEKILVNEQKVRLKKMEKIEIEKILNESILSEKILKRV |
| | | | KQYTLEHIMYLGKLRHNDIVKMTVNTDDFSRLHAKEELDLE |
| | | | LITFFASTNMELNKIFNGKEKVTDFFGFNLNGQKITLKEKVPS |
| | | | FKLNILKKLNFINNENNIDEKLSHFYSFQKEGYLLRNKILHNS |
| | | | YGNIQETKNLKGEYENVEKLIKELKVSDEEISKSLSLDVIFEG |
| | | | KVDIINKINSLKIGEYKDKKYLPSFSKIVLEITRKFREINKDKL |
| | | | FDIESEKIILNAVKYVNKILYEKITSNEENEFLKTLPDKLVKKS |
| | | | NNKKENKNLLSIEEYYKNAQVSSSKGDKKAIKKYQNKVTNA |
| | | | YLEYLENTFTEIIDFSKFNLNYDEIKTKIEERKDNKSKIIIDSIST |
| | | | NINITNDIEYIISIFALLNSNTYINKIRNRFFATSVWLEKQNGTK |
| | | | EYDYENIISILDEVLLINLLRENNITDILDLKNAIIDAKIVENDE |
| | | | TYIKNYIFESNEEKLKKRLFCEELVDKEDIRKIFEDENFKFKSF |
| | | | IKKNEIGNFKINFGILSNLECNSEVEAKKIIGKNSKKLESFIQNI |
| | | | IDEYKSNIRTLFSSEFLEKYKEEIDNLVEDTESENKNKFEKIYY |
| | | | PKEHKNELYIYKKNLFLNIGNPNFDKIYGLISKDIKNVDTKIL |
| | | | FDDDIKKNKISEIDAILKNLNDKLNGYSNDYKAKYVNKLKE |
| | | | NDDFFAKNIQNENYSSFGEFEKDYNKVSEYKKIRDLVEFNYL |
| | | | NKIESYLIDINWKLAIQMARFERDMHYIVNGLRELGIIKLSGY |
| | | | NTGISRAYPKRNGSDGFYTTTAYYKFFDEESYKKFEKICYGF |
| | | | GIDLSENSEINKPENESIRNYISHFYIVRNPFADYSIAEQIDRVS |
| | | | NLLSYSTRYNNSTYASVFEVFKKDVNLDYDELKKKFRLIGN |
| | | | NDILERLMKPKKVSVLELESYNSDYIKNLIIELLTKIENTNDTL |
| C2-23 | | Lachnospiraceae | MKISKVDHTRMAVAKGNQHRRDEISGILYKDPTKTGSIDFDE |
| | | bacterium | RFKKLNCSAKILYHVFNGIAEGSNKYKNIVDKVNNNLDRVL |
| | | NK4A144 | FTGKSYDRKSIIDIDTVLRNVEKINAFDRISTEEREQIIDDLLEI |
| | | (SEQ ID | QLRKGLRKGKAGLREVLLIGAGVIVRTDKKQEIADFLEILDE |
| | | No. 214) | DFNKTNQAKNIKLSIENQGLVVSPVSRGEERIFDVSGAQKGK |
| | | | SSKKAQEKEALSAFLLDYADLDKNVRFEYLRKIRRLINLYFY |
| | | | VKNDDVMSLTEIPAEVNLEKDFDIWRDHEQRKEENGDFVGC |
| | | | PDILLADRDVKKSNSKQVKIAERQLRESIREKNIKRYRFSIKTI |
| | | | EKDDGTYFFANKQISVFWIHRIENAVERILGSINDKKLYRLRL |
| | | | GYLGEKVWKDILNFLSIKYIAVGKAVFNFAMDDLQEKDRDI |
| | | | EPGKISENAVNGLTSFDYEQIKADEMLQREVAVNVAFAANN |
| | | | LARVTVDIPQNGEKEDILLWNKSDIKKYKKNSKKGILKSILQ |
| | | | FFGGASTWNMKMFEIAYHDQPGDYEENYLYDIIQIIYSLRNK |
| | | | SFHFKTYDHGDKNWNRELIGKMIEHDAERVISVEREKFHSN |
| | | | NLPMFYKDADLKKILDLLYSDYAGRASQVPAFNTVLVRKNF |
| | | | PEFLRKDMGYKVHFNNPEVENQWHSAVYYLYKEIYYNLFL |
| | | | RDKEVKNLFYTSLKNIRSEVSDKKQKLASDDFASRCEEIEDR |
| | | | SLPEICQIIMTEYNAQNFGNRKVKSQRVIEKNKDIFRHYKML |
| | | | LIKTLAGAFSLYLKQERFAFIGKATPIPYETTDVKNFLPEWKS |
| | | | GMYASFVEEIKNNLDLQEWYIVGRFLNGRMLNQLAGSLRSY |
| | | | IQYAEDIERRAAENRNKLFSKPDEKIEACKKAVRVLDLCIKIS |
| | | | TRISAEFTDYFDSEDDYADYLEKYLKYQDDAIKELSGSSYAA |
| | | | LDHFCNKDDLKFDIYVNAGQKPILQRNIVMAKLFGPDNILSE |
| | | | VMEKVTESAIREYYDYLKKVSGYRVRGKCSTEKEQEDLLKF |
| | | | QRLKNAVEFRDVTEYAEVINELLGQLISWSYLRERDLLYFQL |
| | | | GFHYMCLKNKSFKPAEYVDIRRNNGTIIHNAILYQIVSMYIN |
| | | | GLDFYSCDKEGKTLKPIETGKGVGSKIGQFIKYSQYLYNDPS |
| | | | YKLEIYNAGLEVFENIDEHDNITDLRKYVDHFKYYAYGNKM |
| | | | SLLDLYSEFFDRFFTYDMKYQKNVVNVLENILLRHFVIFYPK |
| | | | FGSGKKDVGIRDCKKERAQIEISEQSLTSEDFMFKLDDKAGE |
| | | | EAKKFPARDERYLQTIAKLLYYPNEIEDMNRFMKKGETINK |
| | | | KVQFNRKKKITRKQKNNSSNEVLSSTMGYLFKNIKL |
| C2-24 | | Chloroflexus | MTDQVRREEVAAGELADTPLAAAQTPAADAAVAATPAPAE |
| | | aggregans | AVAPTPEQAVDQPATTGESEAPVTTAQAAAHEAEPAEATGA |
| | | (SEQ ID | SFTPVSEQQPQKPRRLKDLQPGMELEGKVTSIALYGIFVDVG |
| | | No. 215) | VGRDGLVHISEMSDRRIDTPSELVQIGDTVKVWVKSVDLDA |
| | | | RRISLTMLNPSRGEKPRRSRQSQPAQPQPRRQEVDREKLASL |
| | | | KVGEIVEGVITGFAPFGAFADIGVGKDGLIHISELSEGRVEKP |
| | | | EDAVKVGERYQFKVLEIDGEGTRISLSLRRAQRTQRMQQLEP |
| | | | GQIIEGTVSGIATFGAFVDIGVGRDGLVHISALAPHRVAKVED |
| | | | VVKVGDKVKVKVLGVDPQSKRISLTMRLEEEQPATTAGDEA |
| | | | AEPAEEVTPTRRGNLERFAAAAQTARERSERGERSERGERRE |
| | | | RRERRPAQSSPDTYIVGEDDDESFEGNATIEDLLTKFGGSSSR |
| | | | RDRDRRRRHEDDDDEEMERPSNRRQREAIRRTLQQIGYDE |
| C2-25 | | Demequina | MDLTWHALLILFIVALLAGFLDTLAGGGGLLTVPALLLTGIP |
| | | aurantiaca | PLQALGTNKLQSSFGTGMATYQVIRKKRVHWRDVRWPMV |
| | | (SEQ ID | WAFLGSAAGAVAVQFIDTDALLIIIPVVLALVAAYFLFVPKS |
| | | No. 216) | HLPPPEPRMSDPAYEATLVPIIGAYDGAFGPGTGSLYALSGV |
| | | | ALRAKTLVQSTAIAKTLNFATNFAALLVFAFAGHMLWTVGA |
| | | | VMIAGQLIGAYAGSHMLFRVNPLVLRVLIVVMSLGMLIRVL |
| | | | LD |
| C2-26 | | Thalassospira | MRIIKPYGRSHVEGVATQEPRRKLRLNSSPDISRDIPGFAQSH |
| | | sp. | DALIIAQWISAIDKIATKPKPDKKPTQAQINLRTTLGDAAWQ |
| | | TSL5-1 | HVMAENLLPAATDPAIREKLHLIWQSKIAPWGTARPQAEKD |
| | | (SEQ ID | GKPTPKGGWYERFCGVLSPEAITQNVARQIAKDIYDHLHVA |
| | | No. 217) | AKRKGREPAKQGESSNKPGKFKPDRKRGLIEERAESIAKNAL |
| | | | RPGSHAPCPWGPDDQATYEQAGDVAGQIYAAARDCLEEKK |
| | | | RRSGNRNTSSVQYLPRDLAAKILYAQYGRVFGPDTTIKAALD |
| | | | EQPSLFALHKAIKDCYHRLINDARKRDILRILPRNMAALFRL |
| | | | VRAQYDNRDINALIRLGKVIHYHASEQGKSEHHGIRDYWPS |
| | | | QQDIQNSRFWGSDGQADIKRHEAFSRIWRHIIALASRTLHDW |
| | | | ADPHSQKFSGENDDILLLAKDAIEDDVFKAGHYERKCDVLF |
| | | | GAQASLFCGAEDFEKAILKQAITGTGNLRNATFHFKGKVRFE |
| | | | KELQELTKDVPVEVQSAIAALWQKDAEGRTRQIAETLQAVL |
| | | | AGHFLTEEQNRHIFAALTAAMAQPGDVPLPRLRRVLARHDSI |
| | | | CQRGRILPLSPCPDRAKLEESPALTCQYTVLKMLYDGPFRAW |
| | | | LAQQNSTILNHYIDSTIARTDKAARDMNGRKLAQAEKDLITS |
| | | | RAADLPRLSVDEKMGDFLARLTAATATEMRVQRGYQSDGE |
| | | | NAQKQAAFIGQFECDVIGRAFADFLNQSGFDFVLKLKADTP |
| | | | QPDAAQCDVTALIAPDDISVSPPQAWQQVLYFILHLVPVDDA |
| | | | SHLLHQIRKWQVLEGKEKPAQIAHDVQSVLMLYLDMHDAK |
| | | | FTGGAALHGIEKFAEFFAHAADFRAVFPPQSLQDQDRSIPRR |
| | | | GLREIVRFGHLPLLQHMSGTVQITHDNVVAWQAARTAGAT |
| | | | GMSPIARRQKQREELHALAVERTARFRNADLQNYMHALVD |
| | | | VIKHRQLSAQVTLSDQVRLHRLMMGVLGRLVDYAGLWERD |
| | | | LYFVVLALLYHHGATPDDVFKGQGKKNLADGQVVAALKPK |
| | | | NRKAAAPVGVFDDLDHYGIYQDDRQSIRNGLSHFNMLRGG |
| | | | KAPDLSHWVNQTRSLVAHDRKLKNAVAKSVIEMLAREGFD |
| | | | LDWGIQTDRGQHILSHGKIRTRQAQHFQKSRLHIVKKSAKPD |
| | | | KNDTVKIRENLHGDAMVERVVQLFAAQVQKRYDITVEKRL |
| | | | DHLFLKPQDQKGKNGIHTHNGWSKTEKKRRPSRENRKGNH |
| | | | EN |
| C2-27 | | SAMN04487830_13920 | MKFSKESHRKTAVGVTESNGIIGLLYKDPLNEKEKIEDVVNQ |
| | | [Pseudobutyrivibrio | RANSTKRLFNLFGTEATSKDISRASKDLAKVVNKAIGNLKGN |
| | | sp. OR37] | KKFNKKEQITKGLNTKIIVEELKNVLKDEKKLIVNKDIIDEAC |
| | | (SEQ ID | SRLLKTSFRTAKTKQAVKMILTAVLIENTNLSKEDEAFVHEY |
| | | No. 218) | FVKKLVNEYNKTSVKKQIPVALSNQNMVIQPNSVNGTLEISE |
| | | | TKKSKETKTTEKDAFRAFLRDYATLDENRRHKMRLCLRNLV |
| | | | NLYFYGETSVSKDDFDEWRDHEDKKQNDELFVKKIVSIKTD |
| | | | RKGNVKEVLDVDATIDAIRTNNIACYRRALAYANENPDVFF |
| | | | SDTMLNKFWIHHVENEVERIYGHINNNTGDYKYQLGYLSEK |
| | | | VWKGIINYLSIKYIAEGKAVYNYAMNALAKDNNSNAFGKLD |
| | | | EKFVNGITSFEYERIKAEETLQRECAVNIAFAANHLANATVD |
| | | | LNEKDSDFLLLKHEDNKDTLGAVARPNILRNILQFFGGKSRW |
| | | | NDFDFSGIDEIQLLDDLRKMIYSLRNSSFHFKTENIDNDSWNT |
| | | | KLIGDMFAYDFNMAGNVQKDKMYSNNVPMFYSTSDIEKML |
| | | | DRLYAEVHERASQVPSFNSVFVRKNFPDYLKNDLKITSAFGV |
| | | | DDALKWQSAVYYVCKEIYYNDFLQNPETFTMLKDYVQCLPI |
| | | | DIDKSMDQKLKSERNAHKNFKEAFATYCKECDSLSAICQMI |
| | | | MTEYNNQNKGNRKVISARTKDGDKLIYKHYKMILFEALKN |
| | | | VFTIYLEKNINTYGFLKKPKLINNVPAIEEFLPNYNGRQYETL |
| | | | VNRITEETELQKWYIVGRLLNPKQVNQLIGNFRSYVQYVND |
| | | | VARRAKQTGNNLSNDNIAWDVKNIIQIFDVCTKLNGVTSNIL |
| | | | EDYFDDGDDYARYLKNFVDYTNKNNDHSATLLGDFCAKEI |
| | | | DGIKIGIYHDGTNPIVNRNIIQCKLYGATGIISDLTKDGSILSV |
| | | | DYEIIKKYMQMQKEIKVYQQKGICKTKEEQQNLKKYQELKN |
| | | | IVELRNIIDYSEILDELQGQLINWGYLRERDLMYFQLGFHYLC |
| | | | LHNESKKPVGYNNAGDISGAVLYQIVAMYTNGLSLIDANGK |
| | | | SKKNAKASAGAKVGSFCSYSKEIRGVDKDTKEDDDPIYLAG |
| | | | VELFENINEHQQCINLRNYIEHFHYYAKHDRSMLDLYSEVFD |
| | | | RFFTYDMKYTKNVPNMMYNILLQHLVVPAFEFGSSEKRLDD |
| | | | NDEQTKPRAMFTLREKNGLSSEQFTYRLGDGNSTVKLSARG |
| | | | DDYLRAVASLLYYPDRAPEGLIRDAEAEDKFAKINHSNPKSD |
| | | | NRNNRGNFKNPKVQWYNNKTKRK |
| C2-28 | | SAMN02910398_00008 | MKISKVDHRKTAVKITDNKGAEGFIYQDPTRDSSTMEQIISN |
| | | [Butyrivibrio sp. | RARSSKVLFNIFGDTKKSKDLNKYTESLIIYVNKAIKSLKGDK |
| | | YAB3001] | RNNKYEEITESLKTERVLNALIQAGNEFTCSENNIEDALNKY |
| | | (SEQ ID | LKKSFRVGNTKSALKKLLMAAYCGYKLSIEEKEEIQNYFVD |
| | | No. 219) | KLVKEYNKDTVLKYTAKSLKHQNMVVQPDTDNHVFLPSRI |
| | | | AGATQNKMSEKEALTEFLKAYAVLDEEKRHNLRIILRKLVN |
| | | | LYFYESPDFIYPENNEWKEHDDRKNKTETFVSPVKVNEEKN |
| | | | GKTFVKIDVPATKDLIRLKNIECYRRSVAETAGNPITYFTDHN |
| | | | ISKFWIHHIENEVEKIFALLKSNWKDYQFSVGYISEKVWKEII |
| | | | NYLSIKYIAIGKAVYNYALEDIKKNDGTLNFGVIDPSFYDGIN |
| | | | SFEYEKIKAEETFQREVAVYVSFAVNHLSSATVKLSEAQSDM |
| | | | LVLNKNDIEKIAYGNTKRNILQFFGGQSKWKEFDFDRYINPV |
| | | | NYTDIDFLFDIKKMVYSLRNESFHFTTTDTESDWNKNLISAM |
| | | | FEYECRRISTVQKNKFFSNNLPLFYGENSLERVLHKLYDDYV |
| | | | DRMSQVPSFGNVFVRKKFPDYMKEIGIKHNLSSEDNLKLQG |
| | | | ALYFLYKEIYYNAFISSEKAMKIFVDLVNKLDTNARDDKGRI |
| | | | THEAMAHKNFKDAISHYMTHDCSLADICQKIMTEYNQQNT |
| | | | GHRKKQTTYSSEKNPEIFRHYKMILFMLLQKAMTEYISSEEIF |
| | | | DFIMKPNSPKTDIKEEEFLPQYKSCAYDNLIKLIADNVELQK |
| | | | WYITARLLSPREVNQLIGSFRSYKQFVSDIERRAKETNNSLSK |
| | | | SGMTVDVENITKVLDLCTKLNGRFSNELTDYFDSKDDYAVY |
| | | | VSKFLDFGFKIDEKFPAALLGEFCNKEENGKKIGIYHNGTEPI |
| | | | LNSNIIKSKLYGITDVVSRAVKPVSEKLIREYLQQEVKIKPYL |
| | | | ENGVCKNKEEQAALRKYQELKNRIEFRDIVEYSEIINELMGQ |
| | | | LINFSYLRERDLMYFQLGFHYLCLNNYGAKPEGYYSIVNDK |
| | | | RTIKGAILYQIVAMYTYGLPIYHYVDGTISDRRKNKKTVLDT |
| | | | LNSSETVGAKIKYFIYYSDELFNDSLILYNAGLELFENINEHE |
| | | | NIVNLRKYIDHFKYYVSQDRSLLDIYSEVFDRYFTYDRKYKK |
| | | | NVMNLFSNIMLKHFIITDFEFSTGEKTIGEKNTAKKECAKVRI |
| | | | KRGGLSSDKFTYKFKDAKPIELSAKNTEFLDGVARILYYPEN |
| | | | VVLTDLVRNSEVEDEKRIEKYDRNHNSSPTRKDKTYKQDVK |
| | | | KNYNKKTSKAFDSSKLDTKSVGNNLSDNPVLKQFLSESKKK |
| | | | R |
| C2-29 | | Blautia sp. | MKISKVDHVKSGIDQKLSSQRGMLYKQPQKKYEGKQLEEH |
| | | Marseille- | VRNLSRKAKALYQVFPVSGNSKMEKELQIINSFIKNILLRLDS |
| | | P2398 | GKTSEEIVGYINTYSVASQISGDHIQELVDQHLKESLRKYTCV |
| | | (SEQ ID | GDKRIYVPDIIVALLKSKFNSETLQYDNSELKILIDFIREDYLK |
| | | No. 220) | EKQIKQIVHSIENNSTPLRIAEINGQKRLIPANVDNPKKSYIFE |
| | | | FLKEYAQSDPKGQESLLQHMRYLILLYLYGPDKITDDYCEEI |
| | | | EAWNFGSIVMDNEQLFSEEASMLIQDRIYVNQQIEEGRQSKD |
| | | | TAKVKKNKSKYRMLGDKIEHSINESVVKHYQEACKAVEEK |
| | | | DIPWIKYISDHVMSVYSSKNRVDLDKLSLPYLAKNTWNTWI |
| | | | SFIAMKYVDMGKGVYHFAMSDVDKVGKQDNLIIGQIDPKFS |
| | | | DGISSFDYERIKAEDDLHRSMSGYIAFAVNNFARAICSDEFRK |
| | | | KNRKEDVLTVGLDEIPLYDNVKRKLLQYFGGASNWDDSIIDI |
| | | | IDDKDLVACIKENLYVARNVNFHFAGSEKVQKKQDDILEEIV |
| | | | RKETRDIGKHYRKVFYSNNVAVFYCDEDIIKLMNHLYQREK |
| | | | PYQAQIPSYNKVISKTYLPDLIFMLLKGKNRTKISDPSIMNMF |
| | | | RGTFYFLLKEIYYNDFLQASNLKEMFCEGLKNNVKNKKSEK |
| | | | PYQNFMRRFEELENMGMDFGEICQQIMTDYEQQNKQKKKT |
| | | | ATAVMSEKDKKIRTLDNDTQKYKHFRTLLYIGLREAFIIYLK |
| | | | DEKNKEWYEFLREPVKREQPEEKEFVNKWKLNQYSDCSELI |
| | | | LKDSLAAAWYVVAHFINQAQLNHLIGDIKNYIQFISDIDRRA |
| | | | KSTGNPVSESTEIQIERYRKILRVLEFAKFFCGQITNVLTDYY |
| | | | QDENDFSTHVGHYVKFEKKNMEPAHALQAFSNSLYACGKE |
| | | | KKKAGFYYDGMNPIVNRNITLASMYGNKKLLENAMNPVTE |
| | | | QDIRKYYSLMAELDSVLKNGAVCKSEDEQKNLRHFQNLKN |
| | | | RIELVDVLTLSELVNDLVAQLIGWVYIRERDMMYLQLGLHY |
| | | | IKLYFTDSVAEDSYLRTLDLEEGSIADGAVLYQIASLYSFNLP |
| | | | MYVKPNKSSVYCKKHVNSVATKFDIFEKEYCNGDETVIENG |
| | | | LRLFENINLHKDMVKFRDYLAHFKYFAKLDESILELYSKAYD |
| | | | FFFSYNIKLKKSVSYVLTNVLLSYFINAKLSFSTYKSSGNKTV |
| | | | QHRTTKISVVAQTDYFTYKLRSIVKNKNGVESIENDDRRCEV |
| | | | VNIAARDKEFVDEVCNVINYNSDK |
| C2-30 | | Leptotrichia | MKITKIDGISHKKYIKEGKLVKSTSEENKTDERLSELLTIRLD |
| | | sp. | TYIKNPDNASEEENRIRRENLKEFFSNKVLYLKDGILYLKDR |
| | | Marseille- | REKNQLQNKNYSEEDISEYDLKNKNNFLVLKKILLNEDINSE |
| | | P3007 | ELEIFRNDFEKKLDKINSLKYSLEENKANYQKINENNIKKVE |
| | | (SEQ ID | GKSKRNIFYNYYKDSAKRNDYINNIQEAFDKLYKKEDIENLF |
| | | No. 221) | FLIENSKKHEKYKIRECYHKIIGRKNDKENFATIIYEEIQNVNN |
| | | | MKELIEKVPNVSELKKSQVFYKYYLNKEKLNDENIKYVFCH |
| | | | FVEIEMSKLLKNYVYKKPSNISNDKVKRIFEYQSLKKLIENKL |
| | | | LNKLDTYVRNCGKYSFYLQDGEIATSDFIVGNRQNEAFLRNI |
| | | | IGVSSTAYFSLRNILETENENDITGRMRGKTVKNNKGEEKYIS |
| | | | GEIDKLYDNNKQNEVKKNLKMFYSYDFNMNSKKEIEDFFSN |
| | | | IDEAISSIRHGIVHFNLELEGKDIFTFKNIVPSQISKKMFHDEIN |
| | | | EKKLKLKIFKQLNSANVFRYLEKYKILNYLNRTRFEFVNKNI |
| | | | PFVPSFTKLYSRIDDLKNSLGIYWKTPKTNDDNKTKEITDAQI |
| | | | YLLKNIYYGEFLNYFMSNNGNFFEITKEIIELNKNDKRNLKT |
| | | | GFYKLQKFENLQEKTPKEYLANIQSLYMINAGNQDEEEKDT |
| | | | YIDFIQKIFLKGFMTYLANNGRLSLIYIGSDEETNTSLAEKKQ |
| | | | EFDKFLKKYEQNNNIEIPYEINEFVREIKLGKILKYTERLNMF |
| | | | YLILKLLNHKELTNLKGSLEKYQSANKEEAFSDQLELINLLN |
| | | | LDNNRVTEDFELEADEIGKFLDFNGNKVKDNKELKKFDTNK |
| | | | IYFDGENIIKHRAFYNIKKYGMLNLLEKISDEAKYKISIEELKN |
| | | | YSKKKNEIEENHTTQENLHRKYARPRKDEKFTDEDYKKYEK |
| | | | AIRNIQQYTHLKNKVEFNELNLLQSLLLRILHRLVGYTSIWER |
| | | | DLRFRLKGEFPENQYIEEIFNFDNSKNVKYKNGQIVEKYINFY |
| | | | KELYKDDTEKISIYSDKKVKELKKEKKDLYIRNYIAHFNYIPN |
| | | | AEISLLEMLENLRKLLSYDRKLKNAIMKSIVDILKEYGFVVTF |
| | | | KIEKDKKIRIESLKSEEVVHLKKLKLKDNDKKKEPIKTYRNS |
| | | | KELCKLVKVMFEYKMKEKKSEN |
| C2-31 | | Bacteroides | MRITKVKVKESSDQKDKMVLIHRKVGEGTLVLDENLADLTA |
| | | ihuae (SEQ | PIIDKYKDKSFELSLLKQTLVSEKEMNIPKCDKCTAKERCLSC |
| | | ID No. 222) | KQREKRLKEVRGAIEKTIGAVIAGRDIIPRLNIFNEDEICWLIK |
| | | | PKLRNEFTFKDVNKQVVKLNLPKVLVEYSKKNDPTLFLAYQ |
| | | | QWIAAYLKNKKGHIKKSILNNRVVIDYSDESKLSKRKQALEL |
| | | | WGEEYETNQRIALESYHTSYNIGELVTLLPNPEEYVSDKGEIR |
| | | | PAFHYKLKNVLQMHQSTVFGTNEILCINPIFNENRANIQLSAY |
| | | | NLEVVKYFEHYFPIKKKKKNLSLNQAIYYLKVETLKERLSLQ |
| | | | LENALRMNLLQKGKIKKHEFDKNTCSNTLSQIKRDEFFVLNL |
| | | | VEMCAFAANNIRNIVDKEQVNEILSKKDLCNSLSKNTIDKEL |
| | | | CTKFYGADFSQIPVAIWAMRGSVQQIRNEIVHYKAEAIDKIF |
| | | | ALKTFEYDDMEKDYSDTPFKQYLELSIEKIDSFFIEQLSSNDV |
| | | | LNYYCTEDVNKLLNKCKLSLRRTSIPFAPGFKTIYELGCHLQ |
| | | | DSSNTYRIGHYLMLIGGRVANSTVTKASKAYPAYRFMLKLI |
| | | | YNHLFLNKFLDNHNKRFFMKAVAFVLKDNRENARNKFQYA |
| | | | FKEIRMMNNDESIASYMSYIHSLSVQEQEKKGDKNDKVRYN |
| | | | TEKFIEKVFVKGFDDFLSWLGVEFILSPNQEERDKTVTREEYE |
| | | | NLMIKDRVEHSINSNQESHIAFFTFCKLLDANHLSDLRNEWI |
| | | | KFRSSGDKEGFSYNFAIDIIELCLLTVDRVEQRRDGYKEQTEL |
| | | | KEYLSFFIKGNESENTVWKGFYFQQDNYTPVLYSPIELIRKY |
| | | | GTLELLKLIIVDEDKITQGEFEEWQTLKKVVEDKVTRRNELH |
| | | | QEWEDMKNKSSFSQEKCSIYQKLCRDIDRYNWLDNKLHLV |
| | | | HLRKLHNLVIQILSRMARFIALWDRDFVLLDASRANDDYKL |
| | | | LSFFNFRDFINAKKTKTDDELLAEFGSKIEKKNAPFIKAEDVP |
| | | | LMVECIEAKRSFYQKVFFRNNLQVLADRNFIAHYNYISKTAK |
| | | | CSLFEMIIKLRTLMYYDRKLRNAVVKSIANVFDQNGMVLQL |
| | | | SLDDSHELKVDKVISKRIVHLKNNNIMTDQVPEEYYKICRRL |
| | | | LEMKK |
| C2-32 | | SAMN05216357_1045 | MEFRDSIFKSLLQKEIEKAPLCFAEKLISGGVFSYYPSERLKEF |
| | | [Porphyromonadaceae | VGNHPFSLFRKTMPFSPGFKRVMKSGGNYQNANRDGRFYD |
| | | bacterium | LDIGVYLPKDGFGDEEWNARYFLMKLIYNQLFLPYFADAEN |
| | | KH3CP3RA] | HLFRECVDFVKRVNRDYNCKNNNSEEQAFIDIRSMREDESIA |
| | | (SEQ ID | DYLAFIQSNIIIEENKKKETNKEGQINFNKFLLQVFVKGFDSFL |
| | | No. 223) | KDRTELNFLQLPELQGDGTRGDDLESLDKLGAVVAVDLKLD |
| | | | ATGIDADLNENISFYTFCKLLDSNHLSRLRNEIIKYQSANSDF |
| | | | SHNEDFDYDRIISIIELCMLSADHVSTNDNESIFPNNDKDFSGI |
| | | | RPYLSTDAKVETFEDLYVHSDAKTPITNATMVLNWKYGTDK |
| | | | LFERLMISDQDFLVTEKDYFVWKELKKDIEEKIKLREELHSL |
| | | | WVNTPKGKKGAKKKNGRETTGEFSEENKKEYLEVCREIDRY |
| | | | VNLDNKLHFVHLKRMHSLLIELLGRFVGFTYLFERDYQYYH |
| | | | LEIRSRRNKDAGVVDKLEYNKIKDQNKYDKDDFFACTFLYE |
| | | | KANKVRNFIAHFNYLTMWNSPQEEEHNSNLSGAKNSSGRQN |
| | | | LKCSLTELINELREVMSYDRKLKNAVTKAVIDLFDKHGMVI |
| | | | KFRIVNNNNNDNKNKHHLELDDIVPKKIMHLRGIKLKRQDG |
| | | | KPIPIQTDSVDPLYCRMWKKLLDLKPTPF |
| C2-33 | | Listeria | MHDAWAENPKKPQSDAFLKEYKACCEAIDTYNWHKNKAT |
| | | riparia | LVYVNELHHLLIDILGRLVGYVAIADRDFQCMANQYLKSSG |
| | | (SEQ ID | HTERVDSWINTIRKNRPDYIEKLDIFMNKAGLFVSEKNGRNY |
| | | No. 224) | IAHLNYLSPKHKYSLLYLFEKLREMLKYDRKLKNAVTKSLID |
| | | | LLDKHGMCVVFANLKNNKHRLVIASLKPKKIETFKWKKIK |
| C2-34 | | Insolitispinillum | MRIIRPYGSSTVASPSPQDAQPLRSLQRQNGTFDVAEFSRRHP |
| | | peregrinum | ELVLAQWVAMLDKIIRKPAPGKNSTALPRPTAEQRRLRQQV |
| | | (SEQ ID | GAALWAEMQRHTPVPPELKAVWDSKVHPYSKDNAPATAKT |
| | | No. 225) | PSHRGRWYDRFGDPETSAATVAEGVRRHLLDSAQPFRANGG |
| | | | QPKGKGVIEHRALTIQNGTLLHHHQSEKAGPLPEDWSTYRA |
| | | | DELVSTIGKDARWIKVAASLYQHYGRIFGPTTPISEAQTRPEF |
| | | | VLHTAVKAYYRRLFKERKLPAERLERLLPRTGEALRHAVTV |
| | | | QHGNRSLADAVRIGKILHYGWLQNGEPDPWPDDAALYSSR |
| | | | YWGSDGQTDIKHSEAVSRVWRRALTAAQRTLTSWLYPAGT |
| | | | DAGDILLIGQKPDSIDRNRLPLLYGDSTRHWTRSPGDVWLFL |
| | | | KQTLENLRNSSFHFKTLSAFTSHLDGTCESEPAEQQAAQALW |
| | | | QDDRQQDHQQVFLSLRALDATTYLPTGPLHRIVNAVQSTDA |
| | | | TLPLPRFRRVVTRAANTRLKGFPVEPVNRRTMEDDPLLRCR |
| | | | YGVLKLLYERGFRAWLETRPSIASCLDQSLKRSTKAAQTING |
| | | | KNSPQGVEILSRATKLLQAEGGGGHGIHDLFDRLYAATARE |
| | | | MRVQVGYHHDAEAARQQAEFIEDLKCEVVARAFCAYLKTL |
| | | | GIQGDTFRRQPEPLPTWPDLPDLPSSTIGTAQAALYSVLHLMP |
| | | | VEDVGSLLHQLRRWLVALQARGGEDGTAITATIPLLELYLN |
| | | | RHDAKFSGGGAGTGLRWDDWQVFEDCQATFDRVFPPGPAL |
| | | | DSHRLPLRGLREVLRFGRVNDLAALIGQDKITAAEVDRWHT |
| | | | AEQTIAAQQQRREALHEQLSRKKGTDAEVDEYRALVTAIAD |
| | | | HRHLTAHVTLSNVVRLHRLMTTVLGRLVDYGGLWERDLTF |
| | | | VTLYEAHRLGGLRNLLSESRVNKFLDGQTPAALSKKNNAEE |
| | | | NGMISKVLGDKARRQIRNDFAHFNMLQQGKKTINLTDEINN |
| | | | ARKLMAHDRKLKNAITRSVTTLLQQDGLDIVWTMDASHRL |
| | | | TDAKIDSRNAIHLHKTHNRANIREPLHGKSYCRWVAALFGA |
| | | | TSTPSATKKSDKIR |

[0544] In certain example embodiments, the RNA-targeting effector protein is a Cas13c effector protein as disclosed in U.S. Provisional Patent Application No. 62/525,165 filed Jun. 26, 2017, and PCT Application No. US 2017/047193 filed Aug. 16, 2017. Example wildtype orthologue sequences of Cas13c are provided in Table 4 below. In certain example embodiments, the CRISPR effector protein is a Cas13c protein from Table 3 or 4.

TABLE 3

| | |
|---|---|
| Fusobacterium | MEKFRRQNRNSIIKIIISNYDTKGIKELKVRYRKQAQLDTFIIKTEI |
| necrophorum | VNNDIFIKSIIEKAREKYRYSFLFDGEEKYHFKNKSSVEIVKKDIF |
| subsp. | SQTPDNMIRNYKITLKISEKNPRVVEAEIEDLMNSTILKDGRRSA |
| funduliforme | RREKSMTERKLIEEKVAKNYSLLANCPMEEVDSIKIYKIKRFLT |
| ATCC 51357 | YRSNMLLYFASINSFLCEGIKGKDNETEEIWHLKDNDVRKEKV |
| contig00003 | RENFKNKLIQSTENYNSSLKNQIEEKEKLLRKEFKKGAFYRTIIK |
| (SEQ ID No. | KLQQERIKELSEKSLTEDCEKIIKLYSKLRHSLMHYDYQYFENLF |
| 226) | ENKKNDDLMKDLNLDLFKSLPLIRKMKLNNKVNYLEDGDTLF |
| | VLQKTKKAKTLYQIYDALCEQKNGFNKFINDFFVSDGEENTVF |
| | KQIINEKFQSEMEFLEKRISESEKKNEKLKKKLDSMKAHFRNINS |
| | EDTKEAYFWDIHSSRNYKTKYNERKNLVNEYTELLGSSKEKKL |
| | LREEITKINRQLLKLKQEMEEITKKNSLFRLEYKMKIAFGFLFCE |
| | FDGNISKFKDEFDASNQEKIIQYHKNGEKYLTSFLKEEEKEKFNL |
| | EKMQKIIQKTEEEDWLLPETKNNLFKFYLLTYLLLPYELKGDFL |
| | GFVKKHYYDIKNVDFIDENQNNIQVSQTVEKQEDYFYHKIRLFE |
| | KNTKKYEIVKYSIVPNEKLKQYFEDLGIDIKYLTVEQKSEVSEEK |
| | NKKVSLKNNGMFNKTILLFVFKYYQIAFKLFNDIELYSLFFLRE |
| | KSGKPLEIFRKELESKMKDGYLNFGQLLYVVYEVLVKNKDLDK |
| | ILSKKIDYRKDKSFSPEIAYLRNFLSHLNYSKFLDNFMKINTNKS |
| | DENKEVLIPSIKIQKMIQFIEKCNLQNQIDFDFNFVNDFYMRKEK |
| | MFFIQLKQIFPDINSTEKQKMNEKEEILRNRYHLTDKKNEQIKDE |
| | HEAQSQLYEKILSLQKIYSSDKNNFYGRLKEEKLLFLEKQGKKK |
| | LSMEEIKDKIAGDISDLLGILKKEITRDIKDKLTEKFRYCEEKLLN |
| | LSFYNHQDKKKEESIRVFLIRDKNSDNFKFESILDDGSNKIFISKN |
| | GKEITIQCCDKVLETLIIEKNTLKISSNGKIISLIPHYSYSIDVKY |
| Fusobacterium | MEKFRRQNRSSIIKIIISNYDTKGIKELKVRYRKQAQLDTFIIKTEI |
| necrophorum | VNNDIFIKSBEKAREKYRYSFLFDGEEKYHFKNKSSVEIVKKDIF |
| DJ-2 | SQTPDNMIRNYKITLKISEKNPRVVEAEIEDLMNSTILKDGRRSA |
| contig0065, | RREKSMTERKLIEEKVAENYSLLANCPMEEVDSIKIYKIKRFLTY |
| whole genome | RSNMLLYFASINSFLCEGIKGKDNETEEIWHLKDNDVRKEKVKE |
| shotgun | NFKNKLIQSTENYNSSLKNQIEEKEKLLRKESKKGAFYRTIIKKL |
| sequence (SEQ | QQERIKELSEKSLTEDCEKIIKLYSELRHPLMHYDYQYFENLFEN |
| ID No. 227) | KENSELTKNLNLDIFKSLPLVRKMKLNNKVNYLEDNDTLFVLQ |
| | KTKKAKTLYQIYDALCEQKNGFNKFINDFFVSDGEENTVFKQII |
| | NEKFQSEIEFLEKRISESEKKNEKLKKKLDSMKAHFRNINSEDTK |
| | EAYFWDIHSSRNYKTKYNERKNLVNEYTELLGSSKEKKLLREEI |
| | TKINRQLLKLKQEMEEITKKNSLFRLEYKMKMAFGFLFCEFDG |
| | NISRFKDEFDASNQEKIIQYHKNGEKYLTYFLKEEEKEKFNLKK |
| | LQETIQKTGEENWLLPQNKNNLFKFYLLTYLLLPYELKGDFLGF |
| | VKKHYYDIKNVDFMDENQSSKIIESKEDDFYHKIRLFEKNTKKY |
| | EIVKYSIVPDKKLKQYFKDLGIDTKYLILDQKSEVSGEKNKKVS |
| | LKNNGMFNKTILLFVFKYYQIAFKLFNDIELYSLFFLREKSGKPF |
| | EVFLKELKDKMIGKQLNFGQLLYVVYEVLVKNKDLSEILSERID |
| | YRKDMCFSAEIADLRNFLSHLNYSKFLDNFMKINTNKSDENKE |
| | VLIPSIKIQKMIKFIEECNLQSQIDFDFNFVNDFYMRKEKMFFIQL |
| | KQIFPDINSTEKQKMNEKEEILRNRYHLTDKKNEQIKDEHEAQS |
| | QLYEKILSLQKIYSSDKNNFYGRLKEEKLLFLEKQEKKKLSMEEI |
| | KDKIAGDISDLLGILKKEITRDIKDKLTEKFRYCEEKLLNLSFYN |
| | HQDKKKEESIRVFLIRDKNSDNFKFESILDDGSNKIFISKNGKEIT |
| | IQCCDKVLETLIIEKNTLKISSNGKIISLIPHYSYSIDVKY |
| Fusobacterium | MKVRYRKQAQLDTFIIKTEIVNNDIFIKSIIEKAREKYRYSFLFDG |
| necrophorum | EEKYHFKNKSSVEIVKNDIFSQTPDNMIRNYKITLKISEKNPRVV |
| BFTR-1 | EAEIEDLMNSTILKDGRRSARREKSMTERKLIEEKVAENYSLLA |
| contig0068 | NCPIEEVDSIKIYKIKRFLTYRSNMLLYFASINSFLCEGIKGKDNE |
| (SEQ ID No. | TEEIWHLKDNDVRKEKVKENFKNKLIQSTENYNSSLKNQIEEKE |
| 228) | KLSSKEFKKGAFYRTIIKKLQQERIKELSEKSLTEDCEKIIKLYSE |
| | LRHPLMHYDYQYFENLFENKENSELTKNLNLDIFKSLPLVRKM |
| | KLNNKVNYLEDNDTLFVLQKTKKAKTLYQIYDALCEQKNGFN |
| | KFINDFFVSDGEENTVFKQIINEKFQSEMEFLEKRISESEKKNEKL |
| | KKKLDSMKAHFRNINSEDTKEAYFWDIHSSRNYKTKYNERKNL |
| | VNEYTKLLGSSKEKKLLREEITKINRQLLKLKQEMEEITKKNSLF |
| | RLEYKMKIAFGFLFCEFDGNISKFKDEFDASNQEKIIQYHKNGE |
| | KYLTSFLKEEEKEKFNLEKMQKIIQKTEEEDWLLPETKNNLFKF |
| | YLLTYLLLPYELKGDFLGFVKKHYYDIKNVDFMDENQNNIQVS |
| | QTVEKQEDYFYHKIRLFEKNTKKYEIVKYSIVPNEKLKQYFEDL |
| | GIDIKYLTGSVESGEKWLGENLGIDIKYLTVEQKSEVSEEKNKK |
| | VSLKNNGMFNKTILLFVFKYYQIAFKLFNDIELYSLFFLREKSEK |
| | PFEVFLEELKDKMIGKQLNFGQLLYVVYEVLVKNKDLDKILSK |
| | KIDYRKDKSFSPEIAYLRNFLSHLNYSKFLDNFMKINTNKSDEN |
| | KEVLIPSIKIQKMIQFIEKCNLQNQIDFDFNFVNDFYMRKEKMFF |
| | IQLKQIFPDINSTEKQKKSEKEEILRKRYHLINKKNEQIKDEHEA |
| | QSQLYEKILSLQKIFSCDKNNFYRRLKEEKLLFLEKQGKKKISM |
| | KEIKDKIASDISDLLGILKKEITRDIKDKLTEKFRYCEEKLLNISFY |
| | NHQDKKKEEGIRVFLIRDKNSDNFKFESILDDGSNKIFISKNGKEI |
| | TIQCCDKVLETLMIEKNTLKISSNGKIISLIPHYSYSIDVKY |
| Fusobacterium | MTEKKSIIFKNKSSVEIVKKDIFSQTPDNMIRNYKITLKISEKNPR |
| necrophorum | VVEAEIEDLMNSTILKDGRRSARREKSMTERKLIEEKVAENYSL |
| subsp. | LANCPMEEVDSIKIYKIKRFLTYRSNMLLYFASINSFLCEGIKGK |
| funduliforme | DNETEEIWHLKDNDVRKEKVKENFKNKLIQSTENYNSSLKNQIE |
| 1_1_36S | EKEKLLRKESKKGAFYRTIIKKLQQERIKELSEKSLTEDCEKIIKL |
| cont1.14 (SEQ | YSELRHPLMHYDYQYFENLFENKENSELTKNLNLDIFKSLPLVR |
| ID No. 229) | KMKLNNKVNYLEDNDTLFVLQKTKKAKTLYQIYDALCEQKNG |
| | FNKFINDFFVSDGEENTVFKQIINEKFQSEMEFLEKRISESEKKNE |
| | KLKKKFDSMKAHFHNINSEDTKEAYFWDIHSSSNYKTKYNERK |
| | NLVNEYTELLGSSKEKKLLREEITQINRKLLKLKQEMEEITKKNS |
| | LFRLEYKMKIAFGFLFCEFDGNISKFKDEFDASNQEKIIQYHKNG |
| | EKYLTYFLKEEEKEKFNLEKMQKIIQKTEEEDWLLPETKNNLFK |
| | FYLLTYLLLPYELKGDFLGFVKKHYYDIKNVDFMDENQNNIQV |
| | SQTVEKQEDYFYHKIRLFEKNTKKYEIVKYSIVPNEKLKQYFED |
| | LGIDIKYLTGSVESGEKWLGENLGIDIKYLTVEQKSEVSEEKIKK |
| | FL |
| Fusobacterium | MGKPNRSSIIKIIISNYDNKGIKEVKVRYNKQAQLDTFLIKSELK |
| perfoetens | DGKFILYSIVDKAREKYRYSFEIDKTNINKNEILIIKKDIYSNKED |
| ATCC 29250 | KVIRKYILSFEVSEKNDRTIVTKIKDCLETQKKEKFERENTRRLIS |
| T364DRAFT_scaffold00009.9_C | ETERKLLSEETQKTYSKIACCSPEDIDSVKIYKIKRYLAYRSNML |
| (SEQ ID | LFFSLINDIFVKGVVKDNGEEVGEIWRIIDSKEIDEKKTYDLLVE |
| No. 230) | NFKKRMSQEFINYKQSIENKIEKNTNKIKEIEQKLKKEKYKKEIN |
| | RLKKQLIELNRENDLLEKDKIELSDEEIREDIEKILKIYSDLRHKL |
| | MHYNYQYFENLFENKKISKEKNEDVNLTELLDLNLFRYLPLVR |
| | QLKLENKTNYLEKEDKITVLGVSDSAIKYYSYYNFLCEQKNGF |
| | NNFINSFFSNDGEENKSFKEKINLSLEKEIEIMEKETNEKIKEINK |
| | NELQLMKEQKELGTAYVLDIHSLNDYKISHNERNKNVKLQNDI |
| | MNGNRDKNALDKINKKLVELKIKMDKITKRNSILRLKYKLQVA |
| | YGFLMEEYKGNIKKFKDEFDISKEKIKSYKSKGEKYLEVKSEKK |
| | YITKILNSIEDIHNITWLKNQEENNLFKFYVLTYILLPFEFRGDFL |
| | GFVKKHYYDIKNVEFLDENNDRLTPEQLEKMKNDSFFNKIRLFE |
| | KNSKKYDILKESILTSERIGKYFSLLNTGAKYFEYGGEENRGIFN |
| | KNIIIPIFKYYQIVLKLYNDVELAMLLTLSESDEKDINKIKELVTL |
| | KEKVSPKKIDYEKKYKFSVLLDCFNRIINLGKKDFLASEEVKEV |
| | AKTFTNLAYLRNKICHLNYSKFIDDLLTIDTNKSTTDSEGKLLIN |
| | DRIRKLIKFIRENNQKMNISIDYNYINDYYMKKEKFIFGQRKQA |
| | KTIIDSGKKANKRNKAEELLKMYRVKKENINLIYELSKKLNELT |
| | KSELFLLDKKLLKDIDFTDVKIKNKSFFELKNDVKEVANIKQAL |
| | QKHSSELIGIYKKEVIMAIKRSIVSKLIYDEEKVLSIIIYDKTNKK |
| | YEDFLLEIRRERDINKFQFLIDEKKEKLGYEKIIETKEKKKVVVKI |
| | QNNSELVSEPRIIKNKDKKKAKTPEEISKLGILDLTNHYCFNLKI |
| | TL |
| Fusobacterium | MENKGNNKKIDFDENYNILVAQIKEYFTKEIENYNNRIDNIIDKK |
| ulcerans ATCC | ELLKYSEKKEESEKNKKLEELNKLKSQKLKILTDEEIKADVIKII |
| 49185 cont2.38 | KIFSDLRHSLMHYEYKYFENLFENKKNEELAELLNLNLFKNLTL |
| (SEQ ID No. | LRQMKIENKTNYLEGREEFNIIGKNIKAKEVLGHYNLLAEQKNG |
| 231) | FNNFINSFFVQDGTENLEFKKLIDEHFVNAKKRLERNIKKSKKLE |
| | KELEKMEQHYQRLNCAYVWDIHTSTTYKKLYNKRKSLIEEYN |
| | KQINEIKDKEVITAINVELLRIKKEMEEITKSNSLFRLKYKMQIA |
| | YAFLEIEFGGNIAKFKDEFDCSKMEEVQKYLKKGVKYLKYYKD |
| | KEAQKNYEFPFEEIFENKDTHNEEWLENTSENNLFKFYILTYLLL |
| | PMEFKGDFLGVVKKHYYDIKNVDFTDESEKELSQVQLDKMIGD |
| | SFFHKIRLFEKNTKRYEIIKYSILTSDEIKRYFRLLELDVPYFEYE |
| | KGTDEIGIFNKNIILTIFKYYQIIFRLYNDLEIHGLFNISSDLDKILR |
| | DLKSYGNKNINFREFLYVIKQNNNSSTEEEYRKIWENLEAKYLR |
| | LHLLTPEKEEIKTKTKEELEKLNEISNLRNGICHLNYKEIIEEILKT |
| | EISEKNKEATLNEKIRKVINFIKENELDKVELGFNFINDFFMKKE |
| | QFMFGQIKQVKEGNSDSITTERERKEKNNKKLKETYELNCDNL |
| | SEFYETSNNLRERANSSSLLEDSAFLKKIGLYKVKNNKVNSKVK |
| | DEEKRIENIKRKLLKDSSDIMGMYKAEVVKKLKEKLILIFKHDE |
| | EKRIYVTVYDTSKAVPENISKEILVKRNNSKEEYFFEDNNKKYV |
| | TEYYTLEITETNELKVIPAKKLEGKEFKTEKNKENKLMLNNHYC |
| | FNVKIIY |
| Anaerosalibacter | MKSGRREKAKSNKSSIVRVIISNFDDKQVKEIKVLYTKQGGIDVI |
| sp. ND1 | KFKSTEKDEKGRMKFNFDCAYNRLEEEEFNSFGGKGKQSFFVT |
| genome | TNEDLTELHVTKRHKTTGEIIKDYTIQGKYTPIKQDRTKVTVSIT |
| assembly | DNKDHFDSNDLGDKIRLSRSLTQYTNRILLDADVMKNYREIVCS |
| Anaerosalibacter | DSEKVDETINIDSQEIYKINRFLSYRSNMIIYYQMINNFLLHYDG |
| massiliensis | EEDKGGNDSINLINEIWKYENKKNDEKEKIIERSYKSIEKSINQYI |
| ND1 (SEQ ID | LNHNTEVESGDKEKKIDISEERIKEDLKKTFILFSRLRHYMVHYN |
| No. 232) | YKFYENLYSGKNFIIYNKDKSKSRRFSELLDLNIFKELSKIKLVK |
| | NRAVSNYLDKKTTIHVLNKNINAIKLLDIYRDICETKNGFNNFIN |
| | NMMTISGEEDKEYKEMVTKHFNENMNKLSIYLENFKKHSDFKT |
| | NNKKKETYNLLKQELDEQKKLRLWFNAPYVYDIHSSKKYKEL |
| | YVERKKYVDIHSKLIEAGINNDNKKKLNEINVKLCELNTEMKE |
| | MTKLNSKYRLQYKLQLAFGFILEEFNLDIDKFVSAFDKDNNLTI |
| | SKFMEKRETYLSKSLDRRDNRFKKLIKDYKFRDTEDIFCSDREN |
| | NLVKLYILMYILLPVEIRGDFLGFVKKNYYDLKHVDFIDKRNND |
| | NKDTFFHDLRLFEKNVKRLEVTSYSLSDGFLGKKSREKFGKELE |
| | KFIYKNVSIALPTNIDIKEFNKSLVLPMMKNYQIIFKLLNDIEISA |
| | LFLIAKKEGNEGSITFKKVIDKVRKEDMNGNINFSQVMKMALN |
| | EKVNCQIRNSIAHINMKQLYIEPLNIYINNNQNKKTISEQMEEIID |
| | ICITKGLTGKELNKNIINDYYMKKEKLVFNLKLRKRNNLVSIDA |
| | QQKNMKEKSILNKYDLNYKDENLNIKEIILKVNDLNNKQKLLK |
| | ETTEGESNYKNALSKDILLLNGIIRKNINFKIKEMILGIIQQNEYR |
| | YVNINIYDKIRKEDHNIDLKINNKYIEISCYENKSNESTDERINFK |
| | IKYMDLKVKNELLVPSCYEDIYIKKKIDLEIRYIENCKVVYIDIY |
| | YKKYNINLEFDGKTLFVKFNKDVKKNNQKVNLESNYIQNIKFIV |
| | S |

TABLE 4

| Name | Sequence |
|---|---|
| EH019081 | MTEKKSIIFKNKSSVEIVKKDIFSQTPDNMIRNYKITLKISEKNPRVVEAEIEDLMNSTILKDG |
| | RRSARREKSMTERKLIEEKVAENYSLLANCPMEEVDSIKIYKIKRFLTYRSNMLLYFASINSFL |
| | CEGIKGKDNETEEIWHLKDNDVRKEKVKENFKNKLIQSTENYNSSLKNQIEEKEKLLRKESK |
| | KGAFYRTIIKKLQQERIKELSEKSLTEDCEKIIKLYSELRHPLMHYDYQYFENLFENKENSELTK |
| | NLNLDIFKSLPLVRKMKLNNKVNYLEDNDTLFVLQKTKKAKTLYQIYDALCEQKNGFNKFI |
| | NDFFVSDGEENTVFKQIINEKFQSEMEFLEKRISESEKKNEKLKKKFDSMKAHFHNINSEDT |
| | KEAYFWDIHSSSNYKTKYNERKNLVNEYTELLGSSKEKKLLREEITQINRKLLKLKQEMEEIT |
| | KKNSLFRLEYKMKIAFGFLFCEFDGNISKFKDEFDASNQEKIIQYHKNGEKYLTYFLKEEEKE |
| | KFNLEKMQKIIQKTEEEDWLLPETKNNLFKFYLLTYLLLPYELKGDFLGFVKKHYYDIKNVDF |
| | MDENQNNIQVSQTVEKQEDYFYHKIRLFEKNTKKYEIVKYSIVPNEKLKQYFEDLGIDIKYLT |
| | GSVESGEKWLGENLGIDIKYLTVEQKSEVSEEKIKKFL |
| WP_094899336 | MEKDKKGEKIDISQEMIEEDLRKILILFSRLRHSMVHYDYEFYQALYSGKDFVISDKNNLEN |
| | RMISQLLDLNIFKELSKVKLIKDKAISNYLDKNTTIHVLGQDIKAIRLLDIYRDICGSKNGFNKF |
| | INTMITISGEEDREYKEKVIEHFNKKMENLSTYLEKLEKQDNAKRNNKRVYNLLKQKLIEQQ |
| | KLKEWFGGPYVYDIHSSKRYKELYIERKKLVDRHSKLFEEGLDEKNKKELTKINDELSKLNSE |
| | MKEMTKLNSKYRLQYKLQLAFGFILEEFDLNIDTFINNFDKDKDLIISNFMKKRDIYLNRVL |
| | DRGDNRLKNIIKEYKFRDTEDIFCNDRDNNLVKLYILMYILLPVEIRGDFLGFVKKNYYDMK |
| | HVDFIDKKDKEDKDTFFHDLRLFEKNIRKLEITDYSLSSGFLSKEHKVDIEKKINDFINRNGA |
| | MKLPEDITIEEFNKSLILPIMKNYQINFKLLNDIEISALFKIAKDRSITFKQAIDEIKNEDIKKNS |
| | KKNDKNNHKDKNINFTQLMKRALHEKIPYKAGMYQIRNNISHIDMEQLYIDPLNSYMNS |
| | NKNNITISEQIEKIIDVCVTGGVTGKELNNNIINDYYMKKEKLVFNLKLRKQNDIVSIESQEK |
| | NKREEFVFKKYGLDYKDGEINIIEVIQKVNSLQEELRNIKETSKEKLKNKETLFRDISLINGTIR |
| | KNINFKIKEMVLDIVRMDEIRHINIHIYYKGENYTRSNIIKFKYAIDGENKKYYLKQHEINDIN |
| | LELKDKFVTLICNMDKHPNKNKQTINLESNYIQNVKFIIP |
| WP_040490876 | MENKGNNKKIDFDENYNILVAQIKEYFTKEIENYNNRIDNIIDKKELLKYSEKKEESEKNKKL |
| | EELNKLKSQKLKILTDEEIKADVIKIIKIFSDLRHSLMHYEYKYFENLFENKKNEELAELLNLNL |
| | FKNLTLLRQMKIENKTNYLEGREEFNIIGKNIKAKEVLGHYNLLAEQKNGFNNFINSFFVQD |
| | GTENLEFKKLIDEHFVNAKKRLERNIKKSKKLEKELEKMEQHYQRLNCAYVWDIHTSTTYK |
| | KLYNKRKSLIEEYNKQINEIKDKEVITAINVELLRIKKEMEEITKSNSLFRLKYKMQIAYAFLEIE |
| | FGGNIAKFKDEFDCSKMEEVQKYLKKGVKYLKYYKDKEAQKNYEFPFEEIFENKDTHNEE |
| | WLENTSENNLFKFYILTYLLLPMEFKGDFLGVVKKHYYDIKNVDFTDESEKELSQVQLDKMI |
| | GDSFFHKIRLFEKNTKRYEIIKYSILTSDEIKRYFRLLELDVPYFEYEKGTDEIGIFNKNIILTIFKY |
| | YQIIFRLYNDLEIHGLFNISSDLDKILRDLKSYGNKNINFREFLYVIKQNNNSSTEEEYRKIWE |
| | NLEAKYLRLHLLTPEKEEIKTKTKEELEKLNEISNLRNGICHLNYKEIIEEILKTEISEKNKEATLN |
| | EKIRKVINFIKENELDKVELGFNFINDFFMKKEQFMFGQIKQVKEGNSDSITTERERKEKNN |
| | KKLKETYELNCDNLSEFYETSNNLRERANSSSLLEDSAFLKKIGLYKVKNNKVNSKVKDEEKR |
| | IENIKRKLLKDSSDIMGMYKAEVVKKLKEKLILIFKHDEEKRIYVTVYDTSKAVPENISKEILVK |
| | RNNSKEEYFFEDNNKKYVTEYYTLEITETNELKVIPAKKLEGKEFKTEKNKENKLMLNNHYC |
| | FNVKIIY |
| WP_047396607 | MEEIKHKKNKSSIIRVIVSNYDMTGIKEIKVLYQKQGGVDTFNLKTIINLESGNLEIISCKPKE |
| | REKYRYEFNCKTEINTISITKKDKVLKKEIRKYSLELYFKNEKKDTVVAKVTDLLKAPDKIEGER |
| | NHLRKLSSSTERKLLSKTLCKNYSEISKTPIEEIDSIKIYKIKRFLNYRSNFLIYFALINDFLCAGV |
| | KEDDINEVWLIQDKEHTAFLENRIEKITDYIFDKLSKDIENKKNQFEKRIKKYKTSLEELKTET |
| | LEKNKTFYIDSIKTKITNLENKITELSLYNSKESLKEDLIKIISIFTNLRHSLMHYDYKSFENLFEN |
| | IENEELKNLLDLNLFKSIRMSDEFKTKNRTNYLDGTESFTIVKKHQNLKKLYTYYNNLCDKK |
| | NGFNTFINSFFVTDGIENTDFKNLIILHFEKEMEEYKKSIEYYKIKISNEKNKSKKEKLKEKIDLL |
| | QSELINMREHKNLLKQIYFFDIHNSIKYKELYSERKNLIEQYNLQINGVKDVTAINHINTKLLS |
| | LKNKMDKITKQNSLYRLKYKLKIAYSFLMIEFDGDVSKFKNNFDPTNLEKRVEYLDKKEEYL |
| | NYTAPKNKFNFAKLEEELQKIQSTSEMGADYLNVSPENNLFKFYILTYIMLPVEFKGDFLGF |
| | VKNHYYNIKNVDFMDESLLDENEVDSNKLNEKIENLKDSSFFNKIRLFEKNIKKYEIVKYSVS |
| | TQENMKEYFKQLNLDIPYLDYKSTDEIGIFNKNMILPIFKYYQNVFKLCNDIEIHALLALANK |
| | KQQNLEYAIYCCSKKNSLNYNELLKTFNRKTYQNLSFIRNKIAHLNYKELFSDLFNNELDLNT |
| | KVRCLIEFSQNNKFDQIDLGMNFINDYYMKKTRFIFNQRRLRDLNVPSKEKIIDGKRKQQN |
| | DSNNELLKKYGLSRTNIKDIFNKAWY |
| WP_035935671 | MKVRYRKQAQLDTFIIKTEIVNNDIFIKSIIEKAREKYRYSFLFDGEEKYHFKNKSSVEIVKNDI |
| | FSQTPDNMIRNYKITLKISEKNPRVVEAEIEDLMNSTILKDGRRSARREKSMTERKLIEEKV |
| | AENYSLLANCPIEEVDSIKIYKIKRFLTYRSNMLLYFASINSFLCEGIKGKDNETEEIWHLKDN |
| | DVRKEKVKENFKNKLIQSTENYNSSLKNQIEEKEKLSSKEFKKGAFYRTIIKKLQQERIKELSE |
| | KSLTEDCEKIIKLYSELRHPLMHYDYQYFENLFENKENSELTKNLNLDIFKSLPLVRKMKLNN |
| | KVNYLEDNDTLFVLQKTKKAKTLYQIYDALCEQKNGFNKFINDFFVSDGEENTVFKQIINEK |
| | FQSEMEFLEKRISESEKKNEKLKKKLDSMKAHFRNINSEDTKEAYFWDIHSSRNYKTKYNE |
| | RKNLVNEYTKLLGSSKEKKLLREEITKINRQLLKLKQEMEEITKKNSLFRLEYKMKIAFGFLFC |
| | EFDGNISKFKDEFDASNQEKIIQYHKNGEKYLTSFLKEEEKEKFNLEKMQKIIQKTEEEDWL |
| | LPETKNNLFKFYLLTYLLLPYELKGDFLGFVKKHYYDIKNVDFMDENQNNIQVSQTVEKQE |
| | DYFYHKIRLFEKNTKKYEIVKYSIVPNEKLKQYFEDLGIDIKYLTGSVESGEKWLGENLGIDIK |
| | YLTVEQKSEVSEEKNKKVSLKNNGMFNKTILLFVFKYYQIAFKLFNDIELYSLFFLREKSEKPF |
| | EVFLEELKDKMIGKQLNFGQLLYVVYEVLVKNKDLDKILSKKIDYRKDKSFSPEIAYLRNFLS |
| | HLNYSKFLDNFMKINTNKSDENKEVLIPSIKIQKMIQFIEKCNLQNQIDFDFNFVNDFYMR |
| | KEKMFFIQLKQIFPDINSTEKQKKSEKEEILRKRYHLINKKNEQIKDEHEAQSQLYEKILSLQK |
| | IFSCDKNNFYRRLKEEKLLFLEKQGKKKISMKEIKDKIASDISDLLGILKKEITRDIKDKLTEKFR |
| | YCEEKLLNISFYNHQDKKKEEGIRVFLIRDKNSDNFKFESILDDGSNKIFISKNGKEITIQCCD |
| | KVLETLMIEKNTLKISSNGKIISLIPHYSYSIDVKY |
| WP_035906563 | MEKFRRQNRSSIIKIIISNYDTKGIKELKVRYRKQAQLDTFIIKTEIVNNDIFIKSIIEKAREKYRY |
| | SFLFDGEEKYHFKNKSSVEIVKKDIFSQTPDNMIRNYKITLKISEKNPRVVEAEIEDLMNSTIL |
| | KDGRRSARREKSMTERKLIEEKVAENYSLLANCPMEEVDSIKIYKIKRFLTYRSNMLLYFASI |
| | NSFLCEGIKGKDNETEEIWHLKDNDVRKEKVKENFKNKLIQSTENYNSSLKNQIEEKEKLLR |
| | KESKKGAFYRTIIKKLQQERIKELSEKSLTEDCEKIIKLYSELRHPLMHYDYQYFENLFENKEN |
| | SELTKNLNLDIFKSLPLVRKMKLNNKVNYLEDNDTLFVLQKTKKAKTLYQIYDALCEQKNGF |
| | NKFINDFFVSDGEENTVFKQIINEKFQSEIEFLEKRISESEKKNEKLKKKLDSMKAHFRNINSE |
| | DTKEAYFWDIHSSRNYKTKYNERKNLVNEYTELLGSSKEKKLLREEITKINRQLLKLKQEME |
| | EITKKNSLFRLEYKMKMAFGFLFCEFDGNISRFKDEFDASNQEKIIQYHKNGEKYLTYFLKEE |
| | EKEKFNLKKLQETIQKTGEENWLLPQNKNNLFKFYLLTYLLLPYELKGDFLGFVKKHYYDIK |
| | NVDFMDENQSSKIIESKEDDFYHKIRLFEKNTKKYEIVKYSIVPDKKLKQYFKDLGIDTKYLIL |
| | DQKSEVSGEKNKKVSLKNNGMFNKTILLFVFKYYQIAFKLFNDIELYSLFFLREKSGKPFEVF |
| | LKELKDKMIGKQLNFGQLLYVVYEVLVKNKDLSEILSERIDYRKDMCFSAEIADLRNFLSHN |
| | YSKFLDNFMKINTNKSDENKEVLIPSIKIQKMIKFIEECNLQSQIDFDFNFVNDFYMRKEKM |
| | FFIQLKQIFPDINSTEKQKMNEKEEILRNRYHLTDKKNEQIKDEHEAQSQLYEKILSLQKIYSS |
| | DKNNFYGRLKEEKLLFLEKQEKKKLSMEEIKDKIAGDISDLLGILKKEITRDIKDKLTEKFRYCE |
| | EKLLNLSFYNHQDKKKEESIRVFLIRDKNSDNFKFESILDDGSNKIFISKNGKEITIQCCDKVL |
| | ETLIIEKNTLKISSNGKIISLIPHYSYSIDVKY |
| WP_042678931 | MKSGRREKAKSNKSSIVRVIISNFDDKQVKEIKVLYTKQGGIDVIKFKSTEKDEKGRMKFNF |
| | DCAYNRLEEEEFNSFGGKGKQSFFVTTNEDLTELHVTKRHKTTGEIIKDYTIQGKYTPIKQD |
| | RTKVTVSITDNKDHFDSNDLGDKIRLSRSLTQYTNRILLDADVMKNYREIVCSDSEKVDETI |
| | NIDSQEIYKINRFLSYRSNMIIYYQMINNFLLHYDGEEDKGGNDSINLINEIWKYENKKNDE |
| | KEKIIERSYKSIEKSINQYILNHNTEVESGDKEKKIDISEERIKEDLKKTFILFSRLRHYMVHYNY |
| | KFYENLYSGKNFIIYNKDKSKSRRFSELLDLNIFKELSKIKLVKNRAVSNYLDKKTTIHVLNKNI |
| | NAIKLLDIYRDICETKNGFNNFINNMMTISGEEDKEYKEMVTKHFNENMNKLSIYLENFKK |
| | HSDFKTNNKKKETYNLLKQELDEQKKLRLWFNAPYVYDIHSSKKYKELYVERKKYVDIHSKL |
| | IEAGINNDNKKKLNEINVKLCELNTEMKEMTKLNSKYRLQYKLQLAFGFILEEFNLDIDKFV |
| | SAFDKDNNLTISKFMEKRETYLSKSLDRRDNRFKKLIKDYKFRDTEDIFCSDRENNLVKLYIL |
| | MYILLPVEIRGDFLGFVKKNYYDLKHVDFIDKRNNDNKDTFFHDLRLFEKNVKRLEVTSYSL |
| | SDGFLGKKSREKFGKELEKFIYKNVSIALPTNIDIKEFNKSLVLPMMKNYQIIFKLLNDIEISAL |
| | FLIAKKEGNEGSITFKKVIDKVRKEDMNGNINFSQVMKMALNEKVNCQIRNSIAHINMKQ |
| | LYIEPLNIYINNNQNKKTISEQMEEIIDICITKGLTGKELNKNIINDYYMKKEKLVFNLKLRKR |
| | NNLVSIDAQQKNMKEKSILNKYDLNYKDENLNIKEIILKVNDLNNKQKLLKETTEGESNYK |
| | NALSKDILLLNGIIRKNINFKIKEMILGIIQQNEYRYVNINIYDKIRKEDHNIDLKINNKYIEISC |
| | YENKSNESTDERINFKIKYMDLKVKNELLVPSCYEDIYIKKKIDLEIRYIENCKVVYIDIYYKKY |
| | NINLEFDGKTLFVKFNKDVKKNNQKVNLESNYIQNIKFIVS |
| WP_062627846 | MEKFRRQNRNSIIKIIISNYDTKGIKELKVRYRKQAQLDTFIIKTEIVNNDIFIKSIIEKAREKYR |
| | YSFLFDGEEKYHFKNKSSVEIVKKDIFSQTPDNMIRNYKITLKISEKNPRVVEAEIEDLMNSTI |
| | LKDGRRSARREKSVTERKLIEEKVAENYSLLANCPMEEVDSIKIYKIKRFLTYRSNMLLYFASI |
| | NSFLCEGIKGKENETEEIWHLKDNDVRKEKVKENFKNKLIQSTENYNSSLKNQIEEKEKLLR |
| | KESKKGAFYRTIIKKLQQERIKELSEKSLTEDCEKIIKLYSKLRHSLMHYDYQYFENLFENKETP |
| | ELKDKLDLHLFKSLPLIRKMKLNNKVNYLEDGDTLFVLQKTKKAKTLYQIYDALCEQKNGFN |
| | KFINDFFVSDGEENTVFKQIINEKFQSEMEFLGKRISESEEKNPKLKKKFDSMKAHFHNINS |
| | EDTKEAYFWDIHSSSNYKTKYNERKNLVNEYTELLGSSKEKKLLREEITQINRKLLKLKQEME |
| | EITKKNSLFRLEYKMKMAFGFLFCEFDGNISRFKDEFDASNQEKIIQYHKNGEKYLTYFLKEE |
| | EKEKFNLKKLQETIQKTGKENWLLPQNKNNLFKFYLLTYLLLPYELKGDFLGFVKKHYYDIK |
| | NVDFMDENQSSKIIESKEDDFYHKIRLFEKNTKKYEIVKYSIVPDEKLKQYFKDLGIDTKYLIL |
| | EQKSEVSGEKNKKVSLKNNGMFNKTILLFVFKYYQIAFKLFNDIELYSLFFLREKSGKPFEVFL |
| | KELKDKMIGKQLNFGQLLYVIYEVLVKNKDLSEILSERIDYRKDMCFSAEIADLRNFLSHLNY |
| | SKFLDNFMKINTNKSDENKEVLIPSIKIQKMIKFIEECNLQSQIDFDFNFVNDFYMRKEKMF |
| | FIQLKQIFPDINSTEKQKMNEKEEILRNRYHLTDKKNEQIKDEHEAQSQLYEKILSLQKIYSS |
| | DKNNFYGRLKEEKLLFLGKQGKKKLSMEEIKDKIAGDISDLLGILKKEITRDIKDKLTEKFRYC |
| | EEKLLNLSFYNHQDKKKEESIRVFLIRDKNSDNFKFESILDDGSNKIFISKNGKEITIQCCDKV |
| | LETLMIEKNTLKISSNGKIISLVPHYSYSIDVKY |
| WP_005959231 | MEKFRRQNRNSIIKIIISNYDTKGIKELKVRYRKQAQLDTFIIKTEIVNNDIFIKSIIEKAREKYR |
| | YSFLFDGEEKYHFKNKSSVEIVKKDIFSQTPDNMIRNYKITLKISEKNPRVVEAEIEDLMNSTI |
| | LKDGRRSARREKSMTERKLIEEKVAKNYSLLANCPMEEVDSIKIYKIKRFLTYRSNMLLYFAS |
| | INSFLCEGIKGKDNETEEIWHLKDNDVRKEKVRENFKNKLIQSTENYNSSLKNQIEEKEKLL |
| | RKEFKKGAFYRTIIKKLQQERIKELSEKSLTEDCEKIIKLYSKLRHSLMHYDYQYFENLFENKK |
| | NDDLMKDLNLDLFKSLPLIRKMKLNNKVNYLEDGDTLFVLQKTKKAKTLYQIYDALCEQKN |
| | GFNKFINDFFVSDGEENTVFKQIINEKFQSEMEFLEKRISESEKKNEKLKKKLDSMKAHFRN |
| | INSEDTKEAYFWDIHSSRNYKTKYNERKNLVNEYTELLGSSKEKKLLREEITKINRQLLKLKQ |
| | EMEEITKKNSLFRLEYKMKIAFGFLFCEFDGNISKFKDEFDASNQEKIIQYHKNGEKYLTSFL |
| | KEEEKEKFNLEKMQKIIQKTEEEDWLLPETKNNLFKFYLLTYLLLPYELKGDFLGFVKKHYYD |
| | IKNVDFIDENQNNIQVSQTVEKQEDYFYHKIRLFEKNTKKYEIVKYSIVPNEKLKQYFEDLGI |
| | DIKYLTVEQKSEVSEEKNKKVSLKNNGMFNKTILLFVFKYYQIAFKLFNDIELYSLFFLREKSG |
| | KPLEIFRKELESKMKDGYLNFGQLLYVVYEVLVKNKDLDKILSKKIDYRKDKSFSPEIAYLRNF |
| | LSHLNYSKFLDNFMKINTNKSDENKEVLIPSIKIQKMIQFIEKCNLQNQIDFDFNFVNDFYM |
| | RKEKMFFIQLKQIFPDINSTEKQKMNEKEEILRNRYHLTDKKNEQIKDEHEAQSQLYEKILS |
| | LQKIYSSDKNNFYGRLKEEKLLFLEKQGKKKLSMEEIKDKIAGDISDLLGILKKEITRDIKDKLT |
| | EKFRYCEEKLLNLSFYNHQDKKKEESIRVFLIRDKNSDNFKFESILDDGSNKIFISKNGKEITIQ |
| | CCDKVLETLIIEKNTLKISSNGKIISLIPHYSYSIDVKY |
| WP_027128616 | MGKPNRSSIIKIIISNYDNKGIKEVKVRYNKQAQLDTFLIKSELKDGKFILYSIVDKAREKYRYS |
| | FEIDKTNINKNEILIIKKDIYSNKEDKVIRKYILSFEVSEKNDRTIVTKIKDCLETQKKEKFEREN |
| | TRRLISETERKLLSEETQKTYSKIACCSPEDIDSVKIYKIKRYLAYRSNMLLFFSLINDIFVKGVV |
| | KDNGEEVGEIWRIIDSKEIDEKKTYDLLVENFKKRMSQEFINYKQSIENKIEKNTNKIKEIEQ |
| | KLKKEKYKKEINRLKKQLIELNRENDLLEKDKIELSDEEIREDIEKILKIYSDLRHKLMHYNYQY |
| | FENLFENKKISKEKNEDVNLTELLDLNLFRYLPLVRQLKLENKTNYLEKEDKITVLGVSDSAIK |
| | YYSYYNFLCEQKNGFNNFINSFFSNDGEENKSFKEKINLSLEKEIEIMEKETNEKIKEINKNEL |
| | QLMKEQKELGTAYVLDIHSLNDYKISHNERNKNVKLQNDIMNGNRDKNALDKINKKLVEL |
| | KIKMDKITKRNSILRLKYKLQVAYGFLMEEYKGNIKKFKDEFDISKEKIKSYKSKGEKYLEVKS |
| | EKKYITKILNSIEDIHNITWLKNQEENNLFKFYVLTYILLPFEFRGDFLGFVKKHYYDIKNVEFL |
| | DENNDRLTPEQLEKMKNDSFFNKIRLFEKNSKKYDILKESILTSERIGKYFSLLNTGAKYFEY |
| | GGEENRGIFNKNIIIPIFKYYQIVLKLYNDVELAMLLTLSESDEKDINKIKELVTLKEKVSPKKI |
| | DYEKKYKFSVLLDCFNRIINLGKKDFLASEEVKEVAKTFTNLAYLRNKICHLNYSKFIDDLLTI |
| | DTNKSTTDSEGKLLINDRIRKLIKFIRENNQKMNISIDYNYINDYYMKKEKFIFGQRKQAKTII |
| | DSGKKANKRNKAEELLKMYRVKKENINLIYELSKKLNELTKSELFLLDKKLLKDIDFTDVKIKN |
| | KSFFELKNDVKEVANIKQALQKHSSELIGIYKKEVIMAIKRSIVSKLIYDEEKVLSIIIYDKTNKK |
| | YEDFLLEIRRERDINKFQFLIDEKKEKLGYEKIIETKEKKKVVVKIQNNSELVSEPRIIKNKDKK |
| | KAKTPEEISKLGILDLTNHYCFNLKITL |
| WP_062624740 | MEKFRRQNRNSIIKIIISNYDTKGIKELKVRYRKQAQLDTFIIKTEIVNNDIFIKSIIEKAREKYR |
| | YSFLFDGEEKYHFKNKSSVEIVKKDIFSQTPDNMIRNYKITLKISEKNPRVVEAEIEDLMNSTI |
| | LKDGRRSARREKSMTERKLIEEKVAKNYSLLANCPMEEVDSIKIYKIKRFLTYRSNMLLYFAS |
| | INSFLCEGIKGKDNETEEIWHLKDNDVRKEKVRENFKNKLIQSTENYNSSLKNQIEEKEKLL |
| | RKEFKKGAFYRTIIKKLQQERIKELSEKSLTEDCEKIIKLYSKLRHSLMHYDYQYFENLFENKK |
| | NDDLMKDLNLDLFKSLPLIRKMKLNNKVNYLEDGDTLFVLQKTKKAKTLYQIYDALCEQKN |
| | GFNKFINDFFVSDGEENTVFKQIINEKFQSEMEFLEKRISESEKKNEKLKKKLDSMKAHFRN |
| | INSEDTKEAYFWDIHSSRNYKTKYNERKNLVNEYTELLGSSKEKKLLREEITKINRQLLKLKQ |
| | EMEEITKKNSLFRLEYKMKIAFGFLFCEFDGNISKFKDEFDASNQEKIIQYHKNGEKYLTSFL |
| | KEEEKEKFNLEKMQKIIQKTEEEDWLLPETKNNLFKFYLLTYLLLPYELKGDFLGFVKKHYYD |
| | IKNVDFIDENQNNIQVSQTVEKQEDYFYHKIRLFEKNTKKYEIVKYSIVPNEKLKQYFEDLGI |
| | DIKYLTGSVESGEKWLGENLGIDIKYLTVEQKSEVSEEKNKKVSLKNNGMFNKTILLFVFKY |
| | YQIAFKLFNDIELYSLFFLREKSGKPLEIFRKELESKMKDGYLNFGOLLYVVYEVLVKNKDLD |
| | KILSKKIDYRKDKSFSPEIAYLRNFLSHLNYSKFLDNFMKINTNKSDENKEVLIPSIKIQKMIQF |
| | IEKCNLQNQIDFDFNFVNDFYMRKEKMFFIQLKQIFPDINSTEKQKMNEKEEILRNRYHLT |
| | DKKNEQIKDEHEAQSQLYEKILSLQKIYSSDKNNFYGRLKEEKLLFLEKQGKKKLSMEEIKDK |
| | IAGDISDLLGILKKEITRDIKDKLTEKFRYCEEKLLNLSFYNHQDKKKEESIRVFLIRDKNSDNF |
| | KFESILDDGSNKIFISKNGKEITIQCCDKVLETLIIEKNTLKISSNGKIISLIPHYSYSIDVKY |
| WP_096402050 | MENKNKPNRGSIVRIIISNYDMKGIKELKVRYRKQAQLDTFILQTTLDKSNNSILINDFRVK |
| | AREKYRYSFTYDGKEKFSVPSNSIIVTKIDNAAPEKSKEIRKYKITLGIDEKCKTGSMITAAIED |
| | LLEDDRVREGIRNPRRKASKTERKLITESICHNYAQITQCPVEEIDAVKIYKVKRFLSYRSNM |
| | LLFFALINDFLCKNLKNEKGEKINEIWEMENKGNNKKIDFDENYNILVAQIKEYFTKEIENY |
| | NNRIDNIIDKKELLKYSEEKEESEKNKKLEELNKLESQKLKILTDEEIKADVIKIIKIFSDLRHSL |
| | MHYEYKYFENLFENKKNEELAELLNLNLFKNLTLLRQMKIENKTNYLEGDEKFNILGKDVR |
| | AKNALGHYDLLVEQKNGFNNFINSFFVQDGTENLEFKKFIDENFIKAQKELEEDIKNCKESV |
| | KKLEKKLKENPKKSEDLEKKLEKKQKKLKELKKELEKMKQHYKRLNCAYVWDIHSSTVYKKL |
| | YNERKNLIEKYNKQLNGLQDKNAITGINAQLLRIKKEMEEITKSNSLFRLKYKMQIAYAFLE |
| | MEYEGNIAKFKNEFDCSKTEKIQEWLEKSEEYLNYCMEKEEDGKNYKFHFKEISEIKDTHN |
| | EEWLENTSENNLFKFYILTYLLLPMEFKGDFLGVVKKHYYDIKNVDFTDESEKELSQEQIDK |
| | MIGDSFFHKIRLFEKNTKRYEIIKYSILTSDEIKKYFELLELKVPYLEYKGIDEIGIFNKNIILPIFKY |
| | YQIIFRLYNDLEIHGLFNVSFDINKILSDLKSYGNENINFREFLYVIKQNNNSSTEEEYQKIWE |
| | KLESKYLKEPLLTPEKKEINKKTEKELKKLDGISFLRNKISHLEYEKIIEGVLKTAVNGENKKTSE |
| | TNADKVFLNEKIKKIINFIKENELDKIELGFNFINDFFMKKEQFMFGQIKQVKEGNSDSITTE |
| | RKRKEENNKRLKITYGLNYNNLSKIYEFSNTLREIVNSPLFLKDSTLLKKVDLSKVMLKEKPIC |
| | SLQYENNTKLEDDIKRILLKDSSDIMGIYKAEVVKKLKEKLVLIFKYDEEKKIYVTVYDTSKAV |
| | PENISKEILVKRNNSKEEYFFEDNKKKYTTQYYTLEITKENELKVIPAKKLEGKEFKTEKKEEN |
| | KLMLNNHYCFNVKIIY |

[0545] In certain example embodiments, the CRISPR effector protein is a Cas13d protein selected from Table 5.

TABLE 5

| | |
|---|---|
| RfxCas13d | MIEKKKSFAKGMGVKSTLVSGSKVYMTTFAEGSDARLEKIVEGDSIRS |
| (SEQ ID | VNEGEAFSAEMADKNAGYKIGNAKFSHPKGYAVVANNPLYTGPVQQ |
| NO: 233) | DMLGLKETLEKRYFGESADGNDNICIQVIHNILDIEKILAEYITNAAYA |
| | VNNISGLDKDIIGFGKFSTVYTYDEFKDPEHHRAAFNNNDKLINAIKA |
| | QYDEFDNFLDNPRLGYFGQAFFSKEGRNYIINYGNECYDILALLSGLR |
| | HWVVHNNEEESRISRTWLYNLDKNLDNEYISTLNYLYDRITNELTNSF |
| | SKNSAANVNYIAETLGINPAEFAEQYFRFSIMKEQKNLGFNITKLREV |
| | MLDRKDMSEIRKNHKVFDSIRTKVYTMMDFVIYRYYIEEDAKVAAA |
| | NKSLPDNEKSLSEKDIFVINLRGSFNDDQKDALYYDEANRIWRKLENI |
| | MHNIKEFRGNKTREYKKKDAPRLPRILPAGRDVSAFSKLMYALTMFL |
| | DGKEINDLLTTLINKFDNIQSFLKVMPLIGVNAKFVEEYAFFKDSAKIA |
| | DELRLIKSFARMGEPIADARRAMYIDAIRILGTNLSYDELKALADTFSL |
| | DENGNKLKKGKHGMRNFIINNVISNKRFHYLIRYGDPAHLHEIAKNEA |
| | VVKFVLGRIADIQKKQGQNGKNQIDRYYETCIGKDKGKSVSEKVDAL |
| | TKIITGMNYDQFDKKRSVIEDTGRENAEREKFKKIISLYLTVIYHILKNI |
| | VNINARYVIGFHCVERDAQLYKEKGYDINLKKLEEKGFSSVTKLCAGI |
| | DETAPDKRKDVEKEMAERAKESIDSLESANPKLYANYIKYSDEKKAE |
| | EFTRQINREKAKTALNAYLRNTKWNVIIREDLLRIDNKTCTLFRNKAV |
| | HLEVARYVHAYINDIAEVNSYFQLYHYIMQRIIMNERYEKSSGKVSEY |
| | FDAVNDEKKYNDRLLKLLCVPFGYCIPRFKNLSIEALFDRNEAAKFDK |
| | EKKKVSGNS |
| AdmCas13d | MNNKRKTKAKAAGLKSVFFDQKQAVLTTFAKGNNSQIEKKVVNSEV |
| (SEQ ID | KDLRQPPAFDLELKEKTFYISGKNNINTSRENPLASASLPLSKRQRIRA |
| NO: 234) | ERIKRAREENRPYHNVKRVGEDDLRAKADLEKHYFGKEYSDNLKIQII |
| | YNILDINKIISPYINDIVYSMNNLARNDEYIDGKIDVIGSLSSTTDYSSFM |
| | SPNKDLEKEKKFSFHRENYKKFVEASKPYMRYYGKVFIRDVKKSKLS |
| | TGKGEKIEVMYRSDEEIFTIFQILSYVRQSIMHNDIGNKSSILAIEKYPA |
| | RFVGFLSDLLKTKTNDVNRMFIDNNSQTNFWVLFSIFGLQDHTSGAD |
| | KICRNFYDFVIKADSKNLGFSLKKIRELMLDLPNANMLRDHQFDTVRS |
| | KFYTLLDFIIYQHYLEEKSRIDNMVEKLRMTLKEEEKEVLYAAEAKIV |
| | WNAIGAKVINKLVPMMNGDALKEIKRKNRDRKLPQSVIATVQVNSD |
| | ANVFSGLIYFLTLFLDGKEINEMVSNLITKFENIDSLLHVDREIYKSDEK |
| | DLDLEIEKLALFFKGVVRPNAKTDTGAGEISKSFSIFQSAERIIEELKFIK |
| | NVTRMDNEIFPSEGVFLDAANVLGVRGDDFDFSNEFVGDDLHSDANK |
| | KIINKINGTKEDRNLRNFIINNVVKSRRFQYIAREININTHYVKQLANNE |
| | TLNRFVLNKMGDAKIINRYYESISGNTPNIEVRSQIDYLVKRLRSFSFE |
| | DLNDVKQKVRPGTNESIEKEKKKALVGLCLTIQYLVYKNLVNINARY |
| | TTAFYCLERDSKLKGFGVDVWRDFESYTALTNHFIKEGYLPVRKAEIL |
| | RANLKHLDCEDGFKYYRNQVTHLNAIRVAYKYINEIKSVHSYFALYH |
| | YIMQRHLYDSLQAKAKDSSGFVIDALKKSFEHKIYSKDLLHVLHSPFG |
| | YNTARYKNLSIEALFDKNESRPEVNPLSTND |
| UrCas13d | MAKKNKMKPRELREAQKKARQLKAAEINNNAAPAIAAMPAAEVIAP |
| (SEQ ID | AAEKKKSSVKAAGMKSILVSENKMYITSFGKGNSAVLEYEVDNNDY |
| NO: 235) | NQTQLSSKDNSNIQLGGVNEVNITFSSKHGFESGVEINTSNPTHRSGES |
| | SPVRGDMLGLKSELEKRFFGKTFDDNIHIQLIYNILDIEKILAVYVTNIV |
| | YALNNMLGVKGSESHDDFIGYLSTNNIYDVFIDPDNSSLSDDKKANVR |
| | KSLSKFNALLKTKRLGYFGLEEPKTKDNRVSQAYKKRVYHMLAIVGQ |
| | IRQCVFHDKSGAKRFDLYSFINNIDPEYRDTLDYLVEERLKSINKDFIE |
| | DNKVNISLLIDMMKGYEADDIIRLYYDFIVLKSQKNLGFSIKKLREKM |
| | LDEYGFRFKDKQYDSVRSKMYKLMDFLLFCNYYRNDIAAGESLVRK |
| | LRFSMTDDEKEGIYADEAAKLWGKFRNDFENIADHMNGDVIKELGK |
| | ADMDFDEKILDSEKKNASDLLYFSKMIYMLTYFLDGKEINDLLTTLIS |
| | KFDNIKEFLKIMKSSAVDVECELTAGYKLFNDSQRITNELFIVKNIASM |
| | RKPAASAKLTMFRDALTILGIDDKITDDRISGILKLKEKGKGIHGLRNFI |
| | TNNVIESSRFVYLIKYANAQKIREVAKNEKVVMFVLGGIPDTQIERYY |
| | KSCVEFPDMNSSLGVKRSELARMIKNISFDDFKNVKQQAKGRENVAK |
| | ERAKAVIGLYLTVMYLLVKNLVNVNARYVIAIHCLERDFGLYKEIIPE |
| | LASKNLKNDYRILSQTLCELCDKSPNLFLKKNERLRKCVEVDINNADS |
| | SMTRKYRNCIAHLTVVRELKEYIGDICTVDSYFSIYHYVMQRCITKRE |
| | NDTKQEEKIKYEDDLLKNHGYTKDFVKALNSPFGYNIPRFKNLSIEQL |
| | FDRNEYLTEK |
| P1E0Cas13d | MEREVKKPPKKSLAKAAGLKSTFVISPQEKELAMTAFGRGNDALLQK |
| (SEQ ID | RIVDGVVRDVAGEKQQFQVQRQDESRFRLQNSRLADRTVTADDPLH |
| NO: 236) | RAETPRRQPLGAGMDQLRRKAILEQKYFGRTFDDNIHIQLIYNILDIHK |
| | MLAVPANHIVHTLNLLGGYGETDFVGMLPAGLPYDKLRVVKKKNGD |
| | TVDIKADIAAYAKRPQLAYLGAAFYDVTPGKSKRDAARGRVKREQD |
| | VYAILSLMSLLRQFCARDSVRIWGQNTTAALYHLQALPQDMKDLLD |
| | DGWRRALGGVNDHFLDTNKVNLLTLFEYYGAETKQARVALTQDFYR |
| | FVVLKEQKNMGFSLRRLREELLKLPDAAYLTGQEYDSVRQKLYMLL |
| | DFLLCRLYAQERADRCEELVSALRCALSDEEKDTVYQAEAAALWQA |
| | LGDTLRRKLLPLLKGKKLQDKDKKKSDELGLSRDVLDGVLFRPAQQG |
| | SRANADYFCRLMHLSTWFMDGKEINTLLTTLISKLENIDSLRSVLESM |
| | GLAYSFVPAYAMFDHSRYIAGQLRVVNNIARMRKPAIGAKREMYRA |
| | AVVLLGVDSPEAAAAITDDLLQIDPETGKVRPRSDSARDTGLRNFIAN |
| | NVVESRRFTYLLRYMTPEQARVLAQNEKLIAFVLSTVPDTQLERYCRT |
| | CGREDITGRPAQIRYLTAQIMGVRYESFTDVEQRGRGDNPKKERYKA |
| | LIGLYLTVLYLAVKNMVNCNARYVIAFYCRDRDTALYQKEVCWYDL |
| | EEDKKSGKQRQVEDYTALTRYFVSQGYLNRHACGYLRSNIVINGISNSL |
| | LTAYRNAVDHLNAIPPLGSLCRDIGRVDSYFALYHYAVQQYLNGRYY |
| | RKTPREQELFAAMAQHRTWCSDLVKALNTPFGYNLARYKNLSIDGLF |
| | DREGDHVVREDGEKPAE |
| RffCas13d | MKKKMSLREKREAEKQAKKAAYSAASKNTDSKPAEKKAETPKPAEII |
| (SEQ ID | SDNSRNKTAVKAAGLKSTIISGDKLYMTSFGKGNAAVIEQKIDINDYS |
| NO: 237) | FSAMKDTPSLEVDKAESKEISFSSHHPFVKNDKLTTYNPLYGGKDNPE |
| | KPVGRDMLGLKDKLEERYFGCTFNDNLHIQIIYNILDIEKILAVHSANI |
| | TTALDHMVDEDDEKYLNSDYIGYMNTINTYDVFMDPSKNSSLSPKDR |
| | KNIDNSRAKFEKLLSTKRLGYFGFDYDANGKDKKKNEEIKKRLYHLT |
| | AFAGQLRQWSFHSAGNYPRTWLYKLDSLDKEYLDTLDHYFDKRFND |
| | INDDFVTKNATNLYILKEVFPEANFKDIADLYYDFIVIKSHKNMGFSIK |
| | KLREKMLECDGADRIKEQDMDSVRSKLYKLIDFCIFKYYHEFPELSEK |
| | NVDILRAAVSDTKKDNLYSDEAARLWSIFKEKFLGFCDKIVVWVTGE |
| | HEKDITSVIDKDAYRNRSNVSYFSKLMYAMCFFLDGKEINDLLTTLIN |
| | KFDNIANQIKTAKELGINTAFVKNYDFFNHSEKYVDELNIVKNIARMK |
| | KPSSNAKKAMYHDALTILGIPEDMDEKALDEELDLILEKKTDPVTGKP |
| | LKGKNPLRNFIANNVIENSRFIYLIKFCNPENVRKIVNNTKVTEFVLKRI |
| | PDAQIERYYKSCTDSEMNPPTEKKITELAGKLKDMNFGNFRNVRQSA |
| | KENMEKERFKAVIGLYLTVVYRVVKNLVDVNSRYIMAFHSLERDSQL |
| | YNVSVDNDYLALTDTLVKEGDNSRSRYLAGNKRLRDCVKQDIDNAK |
| | KWFVSDKYNSITKYRNNVAHLTAVRNCAEFIGDITKIDSYFALYHYLI |
| | QRQLAKGLDHERSGFDRNYPQYAPLFKWHTYVKDVVKALNAPFGYN |
| | IPRFKNLSIDALFDRNEIKKNDGEKKSDD |
| RaCas13d | MAKKSKGMSLREKRELEKQKRIQKAAVNSVNDTPEKTEEANVVSVN |
| (SEQ ID | VRTSAENKHSKKSAAKALGLKSGLVIGDELYLTSFGRGNEAKLEKKIS |
| NO: 238) | GDTVEKLGIGAFEVAERDESTLTLESGRIKDKTARPKDPRHITVDTQG |
| | KFKEDMLGIRSVLEKKIFGKTFDDNIHVQLAYNILDVEKIMAQYVSDI |
| | VYMLHNTDKTERNDNLMGYMSIRNTYKTFCDTSNLPDDTKQKVENQ |
| | KREFDKIIKSGRLGYFGEAFMVNSGNSTKLRPEKEIYHIFALMASLRQS |
| | YFHGYVKDTDYQGTTWAYTLEDKLKGPSHEFRETIDKIFDEGFSKISK |
| | DFGKMNKVNLQILEQMIGELYGSIERQNLTCDYYDFIQLKKHKYLGFS |
| | IKRLRETMLETTPAECYKAECYNSERQKLYKLIDFLIYDLYYNRKPARI |
| | EEIVDKLRESVNDEEKESIYSVEAKYVYESLSKVLDKSLKNSVSGETIK |
| | DLQKRYDDETANRIWDISQHSISGNVNCFCKLIYIMTLMLDGKEINDL |
| | LTTLVNKFDNIASFIDVMDELGLEHSFTDNYKMFADSKAICLDLQFINS |
| | FARMSKIDDEKSKRQLFRDALVILDIGNKDETWINNYLDSDIFKLDKE |
| | GNKLKGARHDFRNFIANNVIKSSRFKYLVKYSSADGMIKLKTNEKLIG |
| | FVLDKLPETQIDRYYESCGLDNAVVDKKVRIEKLSGLIRDMKFDDFSG |
| | VKTSNKAGDNDKQDKAKYQAIISLYLMVLYQIVKNMIYVNSRYVIAF |
| | HCLERDFGMYGKDFGKYYQGCRKLTDHFIEEKYMKEGKLGCNKKV |
| | GRYLKNNISCCTDGLINTYRNQVDHFAVVRKIGNYAAYIKSIGSWFEL |
| | YHYVIQRIVFDEYRFALNNTESNYKNSIIKHHTYCKDMVKALNTPFGY |
| | DLPRYKNLSIGDLFDRNNYLNKTKESIDANSSIDSQ |
| EsCas13d | MGKKIHARDLREQRKTDRTEKFADQNKKREAERAVPKKDAAVSVKS |
| (SEQ ID | VSSVSSKKDNVTKSMAKAAGVKSVFAVGNTVYMTSFGRGNDAVLEQ |
| NO: 239) | KIVDTSHEPLNIDDPAYQLNVVTMNGYSVTGHRGETVSAVTDNPLRR |
| | FNGRKKDEPEQSVPTDMLCLKPTLEKKFFGKEFDDNIHIQLIYNILDIE |
| | KILAVYSTNAIYALNNMSADENIENSDFFMKRTTDETFDDFEKKKEST |
| | NSREKADFDAFEKFIGNYRLAYFADAFYVNKKNPKGKAKNVLREDK |
| | ELYSVLTLIGKLRHWCVHSEEGRAEFWLYKLDELKDDFKNVLDVVY |
| | NRPVEEINNRFIENNKVNIQILGSVYKNTDIAELVRSYYEFLITKKYKN |
| | MGFSIKKLRESMLEGKGYADKEYDSVRNKLYQMTDFILYTGYINEDS |
| | DRADDLVNTLRSSLKEDDKTTVYCKEADYLWKKYRESIREVADALD |
| | GDNIKKLSKSNIEIQEDKLRKCFISYADSVSEFTKLIYLLTRFLSGKEIN |
| | DLVTTLINKFDNIRSFLEIMDELGLDRTFTAEYSFFEGSTKYLAELVEL |
| | NSFVKSCSFDINAKRTMYRDALDILGIESDKTEEDIEKMIDNILQIDAN |
| | GDKKLKKNNGLRNFIASNVIDSNRFKYLVRYGNPKKIRETAKCKPAV |
| | RFVLNEIPDAQIERYYEACCPKNTALCSANKRREKLADMIAEIKFENFS |
| | DAGNYQKANVTSRTSEAEIKRKNQAIIRLYLTVMYIMLKNLVNVNAR |
| | YVIAFHCVERDTKLYAESGLEVGNIEKNKTNLTMAVMGVKLENGIIK |
| | TEFDKSFAENAANRYLRNARWYKLILDNLKKSERAVVNEFRNTVCHL |
| | NAIRNININIKEIKEVENYFALYHYLIQKHLENRFADKKVERDTGDFIS |
| | KLEEHKTYCKDFVKAYCTPFGYNLVRYKNLTIDGLFDKNYPGKDDSD |
| | EQK |

### Cas13 Variants and Mutations

[0546] The present disclosure provides for variants and mutated forms of Cas proteins. In some examples, the present disclosure includes variants and mutated forms of Cas 13, e.g., Cas13b. The variants or mutated forms of Cas protein may be catalytically inactive, e.g., have no or reduced nuclease activity compared to a corresponding wildtype. In certain examples, the variants or mutated forms of Cas protein have nickase activity.

### Mutations of Cas13

[0547] In some cases, the present disclosure provides for mutated Cas13 proteins comprising one or more modified of amino acids, wherein the amino acids: (a) interact with a guide RNA that forms a complex with the mutated Cas 13 protein; (b) are in a HEPN active site, an inter-domain linker domain, or a bridge helix domain of the mutated Cas 13 protein; or a combination thereof.

[0548] The term “corresponding amino acid” or “residue which corresponds to” refers to a particular amino acid or analogue thereof in a Cas13 homologue or orthologue that is identical or functionally equivalent to an amino acid in reference Cas protein. Accordingly, as used herein, referral to an “amino acid position corresponding to amino acid position [X]” of a specified Cas 13 protein represents referral to a collection of equivalent positions in other recognized Cas 13 and structural homologues and families. The mutations described herein apply to all Cas13 protein that is orthologs or homologs of the referred Cas protein (e.g., PbCas13b). For example, the mutations apply to Cas13a, Cas13b, Cas13c, Cas13d, Cas13b-t1, Cas13b-t2, or Cas13b-t3.

[0549] In an aspect, the invention relates to a mutated Cas13 protein comprising one or more mutation of an amino acid corresponding to the following amino acids of Prevotella buccae Cas13b (PbCas13b): T405, H407, K457, H500, K570, K590, N634, R638, N652, N653, K655, S658, K741, K744, N756, S757, R762, R791, K846, K857, K870, R877, K183, K193, R600, K607, K612, R614, K617, K826, K828, K829, R824, R830, Q831, K835, K836, R838, R618, D434, K431, R53, K943, R1041, Y164, R285, R287, K292, E296, N297, Q646, N647, R402, K393, N653, N652, R482, N480, D396, E397, D398, E399, K294, E400, R56, N157, H161, H452, N455, K484, N486, G566, H567, A656, V795, A796, W842, K871, E873, R874, R1068, N1069, or H1073.

[0550] PbCas13b as used herein preferably has the sequence of NCBI Reference Sequence WP_004343973.1. It is to be understood that WP_004343973.1 refers to the wild type (i.e. unmutated) PbCas13b. LshCas13a (Leptotrichia shahii Cas13a) as used herein preferably has the sequence of NCBI Reference Sequence WP_018451595.1. It is to be understood that WP_018451595.1 refers to the wild type (i.e. unmutated) LshCas13b. Pgu Cas13b (Porphyromonas gulae Cas13b) as used herein preferably has the sequence of NCBI Reference Sequence WP_039434803.1. It is to be understood that WP_039434803.1 refers to the wild type (i.e. unmutated) Pgu Cas13b. Psp Cas13b (Prevotella sp. P5-125 Cas13b) as used herein preferably has the sequence of NCBI Reference Sequence WP_044065294.1. It is to be understood that WP_044065294.1 refers to the wild type (i.e. unmutated) Psp Cas13b.

[0551] In embodiments of the invention, a Type VI system comprises a mutated Cas13 effector protein according to the invention as described herein (and optionally a small accessory protein encoded upstream or downstream of a Cas13b effector protein). In certain embodiments, the small accessory protein enhances the Cas13b effector's ability to target RNA.

[0552] Insights from the structure of Cas13 enables further rational engineering to improve functionality for RNA targeting specificity, base editing, and nucleic acid detection, etc. Based on the elucidated crystal structure of the Cas13 effector with its crRNA described herein, functional implications of rational engineering and mutagenesis can be postulated, of which non-limiting mutations are exemplified in Table 6 below (with reference to PbCas13b; WP_004343973.1).

TABLE 6

| Residue | Descrption | Expected result |
|---|---|---|
| T405 | coordinates first base of | alter activity |
| | guide (U) | |
| H407 | basestacking with UO | possible PFS |
| | | involvment |
| H407Y/W/F | basestacking with UO | alter PFS |
| K457 | direct readout of A31 | |
| H500 | hydrogen bond with bb of G11 | alter activity |
| K570 | direct readout of G25 | alter activity |
| K590 | bb of U27 | alter activity |
| N634 | bb of A29 | alter activity |
| R638 | bb of A28 | alter activity |
| N652 | direct readout of U2 and C36 | alter activity |
| N653 | direct readout of C36 | alter activity |
| K655 | hydrogen bonds with bb of na 3 | alter activity |
| S658 | coordinates first base of guide | alter activity |
| K741 | direct readout of U27 | alter activity |
| K744 | hydrogen bonds with bb of na 6 | alter activity |
| N756 | direct readout of C33 and C5 | alter activity |
| S757 | direct readout of A32 | alter activity |
| R762 | hydrogen bond with bb of G10 | alter activity |
| R791 | bb of A22 | alter activity |
| K846 | hydrogen bond with bb of U18 | alter activity |
| K857 | hydrogen bond with bb of C15 | alter activity |
| K870 | hydrogen bond with base of U19 | alter activity |
| R877 | direct readout of U18 | alter activity |
| | Channels | |
| K183 | Outerchannel rim | alter activity |
| K193 | Outerchannel rim | alter activity |
| R600 | Outerchannel rim | alter activity |
| K607 | Outerchannel rim | alter activity |
| K612 | Outerchannel rim | alter activity |
| R614 | Outerchannel rim | alter activity |
| K617 | Outerchannel rim | alter activity |
| K826 | Bridge helix domain | alter activity |
| K828 | Bridge helix domain | alter activity |
| K829 | Bridge helix domain | alter activity |
| R824 | Bridge helix domain | alter activity |
| R830 | Bridge helix domain | alter activity |
| Q831 | Bridge helix domain | alter activity |
| K835 | Bridge helix domain | alter activity |
| K836 | Bridge helix domain | alter activity |
| R838 | Bridge helix domain | alter activity |
| R618 | conserved outer channel arginien | alter activity |
| D434 | Conserved loop | alter activity |
| K431 | Conserved loop | alter activity |
| | Active site pocket | |
| 46-57 | HEP1 | |
| 73-79 | HEP1 | |
| 152-164 | HEP1 | |
| 1036-1046 | HEP2 | |
| 1064-1074 | HEP2 | |
| R53A/K/D/E | HEP1 | change in base |
| | | specificity |
| K943A/R/D/E | HEP2 | change in base |
| | | specificity |
| R1041A/K/D/E | HEP2 | change in base |
| | | specificity |
| Y164A/F/W | | affect base stacking |
| | | at active site |
| | Interdomain linker | |
| 285-299 | | |
| R285 | central channel active pocket | alter activity |
| R287 | central channel active pocket | alter activity |
| K292 | central channel active pocket | alter activity |
| E296 | central channel active pocket | alter activity |
| N297 | central channel active pocket | alter activity |
| | Other | |
| | Trans active site loop | alter activity |
| Q646 | Trans active site loop | alter activity |
| N647 | Trans active site loop | alter activity |
| | HEPN interface | |
| | crRNA processiong | |
| R402 | remove crRNA processing | alter crRNA |
| | | processing |
| K393 | remove crRNA processing | alter crRNA |
| | | processing |
| N653 | remove crRNA processing | alter crRNA |
| | | processing |
| N652 | remove crRNA processing | alter crRNA |
| | | processing |
| R482 | remove crRNA processing | alter crRNA |
| | | processing |
| N480 | remove crRNA processing | alter crRNA |
| | | processing |
| | LID domain | |
| D396 | hairpin with unknown function | alter crRNA |
| | | processing |
| E397 | hairpin with unknown function | alter crRNA |
| | | processing |
| D398 | hairpin with unknown function | alter crRNA |
| | | processing |
| E399 | hairpin with unknown function | alter crRNA |
| | | processing |
| K294 | IDL | alter activity |

### Structural (Sub)Domains

[0553] In another aspect, the disclosure provides a mutated Cas13 protein comprising one or more mutations of amino acids, wherein the amino acids: interact with a guide RNA that forms a complex with the engineered Cas 13 protein; or are in a HEPN active site, a lid domain, a helical domain, selected from a helical 1 or a helical 2 domain, an inter-domain linker (IDL) domain, or a bridge helix domain of the mutated Cas 13 protein, or a combination thereof.

[0554] Based on the crystal structure of the Cas protein, different structural domains can be identified. In addition to sequence alignments, the information of the crystal structure and domain architecture allows corresponding amino acids of different orthologues (e.g. Cas13b orthologues) and homologues (other Cas13 proteins, such as Cas13a, Cas13c, or Cas13d) to be identified. By means of example, and without limitation, the crystal structure of PbCas13b in complex with crRNA as reported herein, identifies the following structural domains (see also FIG. 1A): HEPN1 and HEPN2 (catalytic domains, respectively spanning from amino acid 1 to 285 and 930 to 1127); IDL (interdomain linker, spanning from amino acids 286 to 301); helical domains 1 and 2, whereby helical domain is split in helical domain 1-1, 1-2, and 1-3 (respectively spanning from amino acids 302 to 374, 499 to 581, and 747 to 929), and helical domain 2 spanning from amino acids 582 to 746; LID (spanning from amino acids 375 to 498). Helical domain 1, in particular helical domain 1-3 encompasses a bridge helix as a discernible subdomain. Accordingly, particular mutations according to the invention as described herein, apart from having a specified amino acid position in the Cas13 polypeptide can also be linked to a particular structural domain of the Cas13 protein. Hence a corresponding amino acid in a Cas13 orthologue or homologue can have a specified amino acid position in the Cas13 polypeptide as well as belong to a corresponding structural domain (see also for instance FIG. 4 as an example of corresponding amino acids in HEPN1 and HEPN2 of Cas13a and Cas13b). Mutations may be identified by locations in structural (sub) domains, by position corresponding to amino acids of a particular Cas13 protein (e.g. PbCas13b), by interactions with a guide RNA, or a combination thereof.

[0555] The types of mutations can be conservative mutations or non-conservative mutations. In certain preferred embodiments, the amino acid which is mutated is mutated into alanine (A). In certain preferred embodiments, if the amino acid to be mutated is an aromatic amino acid, it is mutated into alanine or another aromatic amino acid (e.g. H, Y, W, or F). In certain preferred embodiments, if the amino acid to be mutated is a charged amino acid, it is mutated into alanine or another charged amino acid (e.g. H, K, R, D, or E). In certain preferred embodiments, if the amino acid to be mutated is a charged amino acid, it is mutated into alanine or another charged amino acid having the same charge. In certain preferred embodiments, if the amino acid to be mutated is a charged amino acid, it is mutated into alanine or another charged amino acid having the opposite charge.

[0556] The invention also provides for methods and compositions wherein one or more amino acid residues of the effector protein may be modified e.g., an engineered or non-naturally-occurring effector protein or Cas13. In an embodiment, the modification may comprise mutation of one or more amino acid residues of the effector protein. The one or more mutations may be in one or more catalytically active domains of the effector protein, or a domain interacting with the crRNA (such as the guide sequence or direct repeat sequence). The effector protein may have reduced or abolished nuclease activity or alternatively increased nuclease activity compared with an effector protein lacking said one or more mutations. The effector protein may not direct cleavage of the RNA strand at the target locus of interest. In a preferred embodiment, the one or more mutations may comprise two mutations. In a preferred embodiment the one or more amino acid residues are modified in a Cas13b effector protein, e.g., an engineered or non-naturally-occurring effector protein or Cas13b. In some cases, the CRISPR-Cas protein comprises one or more mutations in the helical domain.

[0557] The Cas13 protein herein may comprise one or more mutations. In some cases, the Cas13 protein comprises one or more mutations of amino acid corresponding to the following amino acids of Prevotella buccae Cas13b (PbCas13b): T405, H407, K457, H500, K570, K590, N634, R638, N652, N653, K655, S658, K741, K744, N756, S757, R762, R791, K846, K857, K870, R877, K183, K193, R600, K607, K612, R614, K617, K826, K828, K829, R824, R830, Q831, K835, K836, R838, R618, D434, K431, R53, K943, R1041, Y164, R285, R287, K292, E296, N297, Q646, N647, R402, K393, N653, N652, R482, N480, D396, E397, D398, E399, K294, E400, R56, N157, H161, H452, N455, K484, N486, G566, H567, A656, V795, A796, W842, K871, E873, R874, R1068, N1069, or H1073.

[0558] In some cases, the Cas13 protein comprises one or more mutations of an amino acid corresponding to the following amino acids of Prevotella buccae Cas13b (PbCas13b): H407, K457, H500, K570, K590, N634, R638, N652, N653, K655, S658, K741, K744, N756, S757, R762, R791, K846, K857, K870, R877, K183, K193, R600, K607, K612, R614, K617, K826, K828, K829, R824, R830, Q831, K835, K836, R838, R618, D434, K431, R53, K943, R1041, Y164, R285, R287, K292, E296, N297, Q646, N647, R402, K393, N653, N652, R482, N480, D396, E397, D398, E399, K294, E400, R56, N157, H161, H452, N455, K484, N486, G566, H567, W842, K871, E873, R874, R1068, N1069, or H1073.

[0559] In some cases, the Cas13 protein comprises one or more mutations of an amino acid corresponding to the following amino acids of Prevotella buccae Cas13b (PbCas13b): T405, H407, K457, H500, K570, K590, N634, R638, N652, N653, K655, S658, K741, K744, N756, S757, R762, R791, K846, K857, K870, R877, K183, K193, R600, K607, K612, R614, K617, K826, K828, K829, R824, R830, Q831, K835, K836, R838, R618, D434, K431, R53, K943, R1041, Y164, R285, R287, K292, E296, N297, Q646, N647, R402, K393, N653, N652, R482, N480, D396, E397, D398, E399, K294, or E400.

[0560] In some cases, the Cas13 protein comprises one or more mutations of an amino acid corresponding to the following amino acids of Prevotella buccae Cas13b (PbCas13b): K393, R402, N482, T405, H407, S658, N653, A656, K655, N652, H567, N455, H500, K871, K857, K870, W842, E873, R877, K846, R874, R762, V795, A796, R791, G566, K590, R638, H452, S757, N756, N486, K484, N480, K457, K741, R56, N157, H161, R1068, N1069, or H1073. In some cases, the Cas13 protein comprises one or more mutations of an amino acid corresponding to the following amino acids of PbCas13b: K393, R402, N482, H407, S658, N653, K655, N652, H567, N455, H500, K871, K857, K870, W842, E873, R877, K846, R874, R762, R791, G566, K590, R638, H452, S757, N756, N486, K484, N480, K457, K741, R56, N157, H161, R1068, N1069, or H1073.

[0561] In some cases, the Cas13 protein comprises one or more mutations of an amino acid corresponding to the following amino acids of PbCas13b: W842, K846, K870, E873, or R877. In some cases, the Cas13 protein comprises in helical domain 1 one or more mutations of an amino acid corresponding to the following amino acids in helical domain 1 of PbCas13b: W842, K846, K870, E873, or R877. In some cases, the Cas13 protein comprises in helical domain 1-3 one or more mutations of an amino acid corresponding to the following amino acids in helical domain 1-3 of PbCas13b: W842, K846, K870, E873, or R877. In some cases, the Cas13 protein comprises in the helical bridge domain one or more mutations of an amino acid corresponding to the following amino acids in the helical bridge domain of PbCas13b: W842, K846, K870, E873, or R877. In some cases, the Cas13 protein comprises one or more mutations of an amino acid corresponding to the following amino acids of PbCas13b: K393, R402, N480, N482, N652, or N653. In some cases, the Cas13 protein comprises one or more mutations of an amino acid corresponding to the following amino acids of PbCas13b: K393, R402, N480, or N482. In some cases, the Cas13 protein comprises in the LID domain one or more mutations of an amino acid corresponding to the following amino acids in the LID domain of PbCas13b: K393, R402, N480, or N482. In some cases, the Cas13 protein comprises one or more mutations of an amino acid corresponding to the following amino acids of PbCas13b: N652 or N653. In some cases, the Cas13 protein comprises in helical domain 2 one or more mutations of an amino acid corresponding to the following amino acids in helical domain 2 of PbCas13b: N652 or N653.

[0562] In some cases, the Cas13 protein comprises one or more mutations of an amino acid corresponding to the following amino acids of PbCas13b: T405, H407, S658, N653, A656, K655, N652, H567, N455, H500, K871, K857, K870, W842, E873, R877, K846, R874, R762, V795, A796, R791, G566, K590, R638, H452, S757, N756, N486, K484, N480, K457, or K741. In some cases, the Cas13 protein comprises one or more mutations of an amino acid corresponding to the following amino acids of PbCas13b: H407, S658, N653, K655, N652, H567, N455, H500, K871, K857, K870, W842, E873, R877, K846, R874, R762, R791, G566, K590, R638, H452, S757, N756, N486, K484, N480, K457, or K741. In some cases, the Cas13 protein comprises one or more mutations of an amino acid corresponding to the following amino acids of PbCas13b: S658, N653, A656, K655, N652, H567, H500, K871, K857, K870, W842, E873, R877, K846, R874, R762, V795, A796, R791, G566, K590, R638, S757, N756, or K741. In some cases, the Cas13 protein comprises in a helical domain one or more mutations of an amino acid corresponding to the following amino acids in a helical domain of PbCas13b: S658, N653, A656, K655, N652, H567, H500, K871, K857, K870, W842, E873, R877, K846, R874, R762, V795, A796, R791, G566, K590, R638, S757, N756, or K741.

[0563] In some cases, the Cas13 protein comprises one or more mutations of an amino acid corresponding to the following amino acids of PbCas13b: H567, H500, K871, K857, K870, W842, E873, R877, K846, R874, R762, V795, A796, R791, G566, S757, or N756. In some cases, the Cas13 protein comprises in helical domain 1 one or more mutations of an amino acid corresponding to the following amino acids in helical domain 1 of PbCas13b: H567, H500, K871, K857, K870, W842, E873, R877, K846, R874, R762, V795, A796, R791, G566, S757, or N756. In some cases, the Cas13 protein comprises one or more mutations of an amino acid corresponding to the following amino acids of PbCas13b: H567, H500, R762, V795, A796, R791, G566, S757, or N756. In some cases, the Cas13 protein comprises in helical domain 1 one or more mutations of an amino acid corresponding to the following amino acids in helical domain 1 of PbCas13b: H567, H500, R762, V795, A796, R791, G566, S757, or N756.

[0564] In some cases, the Cas13 protein comprises one or more mutations of an amino acid corresponding to the following amino acids of PbCas13b: K871, K857, K870, W842, E873, R877, K846, or R874. In some cases, the Cas13 protein comprises in the helical bridge domain one or more mutations of an amino acid corresponding to the following amino acids in the helical bridge domain of PbCas13b: K871, K857, K870, W842, E873, R877, K846, or R874. In some cases, the Cas13 protein comprises one or more mutations of an amino acid corresponding to the following amino acids of PbCas13b: H567, H500, or G566. In some cases, the Cas13 protein comprises in helical domain 1-2 one or more mutations of an amino acid corresponding to the following amino acids in helical domain 1-2 of PbCas13b: H567, H500, or G566. In some cases, the Cas13 protein comprises one or more mutations of an amino acid corresponding to the following amino acids of PbCas13b: K871, K857, K870, W842, E873, R877, K846, R874, R762, V795, A796, R791, S757, or N756. In some cases, the Cas13 protein comprises in helical domain 1-3 one or more mutation of an amino acid corresponding to the following amino acids in helical domain 1-3 of PbCas13b: K871, K857, K870, W842, E873, R877, K846, R874, R762, V795, A796, R791, S757, or N756. In some cases, the Cas13 protein comprises one or more mutations of an amino acid corresponding to the following amino acids of PbCas13b: R762, V795, A796, R791, S757, or N756. In some cases, the Cas13 protein comprises in helical domain 1-3 one or more mutation of an amino acid corresponding to the following amino acids in helical domain 1-3 of PbCas13b: R762, V795, A796, R791, S757, or N756. In some cases, the Cas13 protein comprises one or more mutations of an amino acid corresponding to the following amino acids of PbCas13b: S658, N653, A656, K655, N652, K590, R638, or K741. In some cases, the Cas13 protein comprises in helical domain 2 one or more mutations of an amino acid corresponding to the following amino acids in helical domain 2 of PbCas13b: S658, N653, A656, K655, N652, K590, R638, or K741. In some cases, the Cas13 protein comprises one or more mutations of an amino acid corresponding to the following amino acids of PbCas13b: T405, H407, N486, K484, N480, H452, N455, or K457. In some cases, the Cas13 protein comprises in the LID domain one or more mutations of an amino acid corresponding to the following amino acids in the LID domain of PbCas13b: T405, H407, N486, K484, N480, H452, N455, or K457. In some cases, the Cas13 protein comprises one or more mutations of an amino acid corresponding to the following amino acids of PbCas13b: S658, N653, K655, N652, H567, H500, K871, K857, K870, W842, E873, R877, K846, R874, R762, R791, G566, K590, R638, S757, N756, or K741.

[0565] In some cases, the Cas13 protein comprises in a helical domain one or more mutations of an amino acid corresponding to the following amino acids in a helical domain of PbCas13b: S658, N653, K655, N652, H567, H500, K871, K857, K870, W842, E873, R877, K846, R874, R762, R791, G566, K590, R638, S757, N756, or K741. In some cases, the Cas13 protein comprises one or more mutations of an amino acid corresponding to the following amino acids of PbCas13b: H567, H500, K871, K857, K870, W842, E873, R877, K846, R874, R762, R791, G566, S757, or N756. In some cases, the Cas13 protein comprises in helical domain 1 one or more mutations of an amino acid corresponding to the following amino acids in helical domain 1 of PbCas13b: H567, H500, K871, K857, K870, W842, E873, R877, K846, R874, R762, R791, G566, S757, or N756. In some cases, the Cas13 protein comprises one or more mutations of an amino acid corresponding to the following amino acids of PbCas13b: H567, H500, R762, R791, G566, S757, or N756. In some cases, the Cas13 protein comprises in helical domain 1 one or more mutations of an amino acid corresponding to the following amino acids in helical domain 1 of PbCas13b: H567, H500, R762, R791, G566, S757, or N756. In some cases, the Cas13 protein comprises one or more mutations of an amino acid corresponding to the following amino acids of PbCas13b: K871, K857, K870, W842, E873, R877, K846, R874, R762, R791, S757, or N756. In some cases, the Cas13 protein comprises in helical domain 1-3 one or more mutations of an amino acid corresponding to the following amino acids in helical domain 1-3 of PbCas13b: K871, K857, K870, W842, E873, R877, K846, R874, R762, R791, S757, or N756. In some cases, the Cas13 protein comprises one or more mutations of an amino acid corresponding to the following amino acids of PbCas13b: R762, R791, S757, or N756. In some cases, the Cas13 protein comprises in helical domain 1-3 one or more mutations of an amino acid corresponding to the following amino acids in helical domain 1-3 of PbCas13b: R762, R791, S757, or N756.

[0566] In some cases, the Cas13 protein comprises one or more mutations of an amino acid corresponding to the following amino acids of PbCas13b: S658, N653, K655, N652, K590, R638, or K741. In some cases, the Cas13 protein comprises in helical domain 2 one or more mutations of an amino acid corresponding to the following amino acids in helical domain 2 of PbCas13b: S658, N653, K655, N652, K590, R638, or K741.

[0567] In some cases, the Cas13 protein comprises one or more mutations of an amino acid corresponding to the following amino acids of PbCas13b: H407, N486, K484, N480, H452, N455, or K457. In some cases, the Cas13 protein comprises in the LID domain one or more mutations of an amino acid corresponding to the following amino acids in the LID domain of PbCas13b: H407, N486, K484, N480, H452, N455, or K457.

[0568] In some cases, the Cas13 protein comprises one or more mutations of an amino acid corresponding to the following amino acids of PbCas13b: R56, N157, H161, R1068, N1069, or H1073. In some cases, the Cas13 protein comprises in a HEPN domain one or more mutations of an amino acid corresponding to the following amino acids in a HEPN domain of PbCas13b: R56, N157, H161, R1068, N1069, or H1073.

[0569] In some cases, the Cas13 protein comprises one or more mutations of an amino acid corresponding to the following amino acids of PbCas13b: R56, N157, or H161. In some cases, the Cas13 protein comprises in HEPN domain 1 one or more mutations of an amino acid corresponding to the following amino acids in HEPN domain 1 of PbCas13b: R56, N157, or H161. In some cases, the Cas13 protein comprises one or more mutations of an amino acid corresponding to the following amino acids of PbCas13b: R1068, N1069, or H1073. In some cases, the Cas13 protein comprises in HEPN domain 2 one or more mutations of an amino acid corresponding to the following amino acids in HEPN domain 2 of PbCas13b: R1068, N1069, or H1073.

[0570] In some cases, the Cas13 protein comprises one or more mutations of an amino acid corresponding to the following amino acids of PbCas13b: K393, R402, N482, T405, H407, N486, K484, N480, H452, N455, or K457. In some cases, the Cas13 protein comprises in the LID domain one or more mutations of an amino acid corresponding to the following amino acids in the LID domain of PbCas13b: K393, R402, N482, T405, H407, N486, K484, N480, H452, N455, or K457. In some cases, the Cas13 protein comprises one or more mutations of an amino acid corresponding to the following amino acids of PbCas13b: K393, R402, N482, H407, N486, K484, N480, H452, N455, or K457. In some cases, the Cas13 protein comprises in the LID domain one or more mutations of an amino acid corresponding to the following amino acids in the LID domain of PbCas13b: K393, R402, N482, H407, N486, K484, N480, H452, N455, or K457.

[0571] In some cases, the Cas13 protein comprises one or more mutations of an amino acid corresponding to the following amino acids of PbCas13b: T405, H407, S658, N653, A656, K655, N652, H567, N455, H500, K871, K857, K870, W842, E873, R877, K846, R874, R762, V795, A796, R791, G566, K590, R638, H452, S757, N756, N486, K484, N480, K457, K741, K393, R402, or N482. In some cases, the Cas13 protein comprises one or more mutations of an amino acid corresponding to the following amino acids of PbCas13b: H407, S658, N653, K655, N652, H567, N455, H500, K871, K857, K870, W842, E873, R877, K846, R874, R762, R791, G566, K590, R638, H452, S757, N756, N486, K484, N480, K457, K741, K393, R402, or N482.

[0572] In some cases, the Cas13 protein comprises one or more mutations of an amino acid corresponding to the following amino acids of PbCas13b: S658, N653, A656, K655, N652, H567, N455, H500, K871, K857, K870, W842, E873, R877, K846, R874, R762, V795, A796, R791, G566, K590, R638, H452, S757, N756, N486, K484, N480, K457, or K741. In some cases, the Cas13 protein comprises one or more mutations of an amino acid corresponding to the following amino acids of PbCas13b: S658, N653, K655, N652, H567, N455, H500, K871, K857, K870, W842, E873, R877, K846, R874, R762, R791, G566, K590, R638, H452, S757, N756, N486, K484, N480, K457, or K741.

[0573] In some cases, the Cas13 protein comprises one or more mutations of an amino acid corresponding to the following amino acids of PbCas13b: N486, K484, N480, H452, N455, or K457. In some cases, the Cas13 protein comprises in the LID domain one or more mutations of an amino acid corresponding to the following amino acids in the LID domain of PbCas13b: N486, K484, N480, H452, N455, or K457. In some cases, the Cas13 protein comprises one or more mutations of an amino acid corresponding to the following amino acids of PbCas13b: K393, R402, N482, N486, K484, N480, H452, N455, or K457. In some cases, the Cas13 protein comprises in the LID domain one or more mutations of an amino acid corresponding to the following amino acids in the LID domain of PbCas13b: K393, R402, N482, N486, K484, N480, H452, N455, or K457.

[0574] In some cases, the Cas13 protein comprises one or more mutations of an amino acid corresponding to the following amino acids of PbCas13b: S658, N653, A656, K655, N652, H567, N455, H500, K871, K857, K870, W842, E873, R877, K846, R874, R762, V795, A796, R791, G566, K590, R638, H452, S757, N756, N486, K484, N480, K457, K741, K393, R402, or N482. In some cases, the Cas13 protein comprises one or more mutations of an amino acid corresponding to the following amino acids of PbCas13b: S658, N653, K655, N652, H567, N455, H500, K871, K857, K870, W842, E873, R877, K846, R874, R762, R791, G566, K590, R638, H452, S757, N756, N486, K484, N480, K457, K741, K393, R402, or N482.

[0575] In some cases, the Cas13 protein comprises one or more mutations of an amino acid corresponding to the following amino acids of Prevotella buccae Cas13b (PbCas13b): R53, Y164, K943, or R1041. In some cases, the Cas13 protein comprises one or more mutations of an amino acid corresponding to the following amino acids of Prevotella buccae Cas13b (PbCas13b): R53 or Y164.

[0576] In some cases, the Cas13 protein comprises one or more mutations of an amino acid corresponding to the following amino acids of Prevotella buccae Cas13b (PbCas13b): K943 or R1041. In some cases, the Cas13 protein comprises in a HEPN domain one or more mutations of an amino acid corresponding to the following amino acids in a HEPN domain of Prevotella buccae Cas13b (PbCas13b): R53, Y164, K943, or R1041. In some cases, the Cas13 protein comprises in HEPN domain 1 one or more mutations of an amino acid corresponding to the following amino acids in HEPN domain 1 of Prevotella buccae Cas13b (PbCas13b): R53 or Y164. In some cases, the Cas13 protein comprises in HEPN domain 2 one or more mutations of an amino acid corresponding to the following amino acids in HEPN domain 2 of Prevotella buccae Cas13b (PbCas13b): K943 or R1041.

[0577] In some cases, the Cas13 protein comprises one or more mutations of an amino acid corresponding to the following amino acids of Prevotella buccae Cas13b (PbCas13b): R53, Y164, K943, R1041, R56, N157, H161, R1068, N1069, or H1073.

[0578] In some cases, the Cas13 protein comprises one or more mutations of an amino acid corresponding to the following amino acids of Prevotella buccae Cas13b (PbCas13b): R53, Y164, R56, N157, or H161. In some cases, the Cas13 protein comprises one or more mutations of an amino acid corresponding to the following amino acids of Prevotella buccae Cas13b (PbCas13b): K943, R1041, R1068, N1069, or H1073. In some cases, the Cas13 protein comprises in a HEPN domain one or more mutations of an amino acid corresponding to the following amino acids in a HEPN domain of Prevotella buccae Cas13b (PbCas13b): R53, Y164, K943, R1041, R56, N157, H161, R1068, N1069, or H1073. In some cases, the Cas13 protein comprises in HEPN domain 1 one or more mutations of an amino acid corresponding to the following amino acids in HEPN domain 1 of Prevotella buccae Cas13b (PbCas13b): R53, Y164, R56, N157, or H161. In some cases, the Cas13 protein comprises in HEPN domain 2 one or more mutations of an amino acid corresponding to the following amino acids in HEPN domain 2 of Prevotella buccae Cas13b (PbCas13b): K943, R1041, R1068, N1069, or H1073.

[0579] In some cases, the Cas13 protein comprises one or more mutations of an amino acid corresponding to the following amino acids of Prevotella buccae Cas13b (PbCas13b): R53, Y164, K183, K193, K943, or R1041. In some cases, the Cas13 protein comprises one or more mutations of an amino acid corresponding to the following amino acids of Prevotella buccae Cas13b (PbCas13b): R53, Y164, K183, or K193. In some cases, the Cas13 protein comprises one or more mutations of an amino acid corresponding to the following amino acids of Prevotella buccae Cas13b (PbCas13b): K943 or R1041. In some cases, the Cas13 protein comprises in a HEPN domain one or more mutations of an amino acid corresponding to the following amino acids in a HEPN domain of Prevotella buccae Cas13b (PbCas13b): R53, Y164, K183, K193, K943, or R1041.

[0580] In some cases, the Cas13 protein comprises in HEPN domain 1 one or more mutations of an amino acid corresponding to the following amino acids in HEPN domain 1 of Prevotella buccae Cas13b (PbCas13b): R53, Y164, K183, or K193. In some cases, the Cas13 protein comprises in HEPN domain 2 one or more mutations of an amino acid corresponding to the following amino acids in HEPN domain 2 of Prevotella buccae Cas13b (PbCas13b): K943 or R1041. In some cases, the Cas13 protein comprises one or more mutations of an amino acid corresponding to the following amino acids of Prevotella buccae Cas13b (PbCas13b): R53, Y164, K183, K193, K943, R1041, R56, N157, H161, R1068, N1069, or H1073. In some cases, the Cas13 protein comprises one or more mutations of an amino acid corresponding to the following amino acids of Prevotella buccae Cas13b (PbCas13b): R53, Y164, K183, K193, R56, N157, or H161. In some cases, the Cas13 protein comprises one or more mutations of an amino acid corresponding to the following amino acids of Prevotella buccae Cas13b (PbCas13b): K943, R1041, R1068, N1069, or H1073. In some cases, the Cas13 protein comprises in a HEPN domain one or more mutations of an amino acid corresponding to the following amino acids in a HEPN domain of Prevotella buccae Cas13b (PbCas13b): R53, Y164, K183, K193, K943, R1041, R56, N157, H161, R1068, N1069, or H1073. In some cases, the Cas13 protein comprises in HEPN domain 1 one or more mutations of an amino acid corresponding to the following amino acids in HEPN domain 1 of Prevotella buccae Cas13b (PbCas13b): R53, Y164, K183, K193, R56, N157, or H161.

[0581] In some cases, the Cas13 protein comprises in HEPN domain 2 one or more mutations of an amino acid corresponding to the following amino acids in HEPN domain 2 of Prevotella buccae Cas13b (PbCas13b): K943, R1041, R1068, N1069, or H1073. In some cases, the Cas13 protein comprises one or more mutations of an amino acid corresponding to the following amino acids of Prevotella buccae Cas13b (PbCas13b): K183 or K193. In some cases, the Cas13 protein comprises in HEPN domain 1 one or more mutations of an amino acid corresponding to the following amino acids in HEPN domain 1 of Prevotella buccae Cas13b (PbCas13b): K183 or K193.

[0582] In some cases, the Cas13 protein comprises one or more mutations of an amino acid corresponding to the following amino acids of Prevotella buccae Cas13b (PbCas13b): R53, Y164, K943, or R1041. In some cases, the Cas13 protein comprises in a HEPN domain one or more mutations of an amino acid corresponding to the following amino acids in a HEPN domain of Prevotella buccae Cas13b (PbCas13b): R53, Y164, K943, or R1041. In some cases, the Cas13 protein comprises one or more mutations of an amino acid corresponding to the following amino acids of Prevotella buccae Cas13b (PbCas13b): R53, K943, or R1041; preferably R53A, R53K, R53D, or R53E; K943A, K943R, K943D, or K943E; or R1041A, R1041K, R1041D, or R1041E.

[0583] In some cases, the Cas13 protein comprises in a HEPN domain one or more mutations of an amino acid corresponding to the following amino acids in a HEPN domain of Prevotella buccae Cas13b (PbCas13b): R53, K943, or R1041; preferably R53A, R53K, R53D, or R53E; K943A, K943R, K943D, or K943E; or R1041A, R1041K, R1041D, or R1041E.

[0584] In some cases, the Cas13 protein comprises a mutation of an amino acid corresponding to amino acid Y164 of Prevotella buccae Cas13b (PbCas13b), preferably Y164A, Y164F, or Y164W. In some cases, the Cas13 protein comprises HEPN domain 1 a mutations of an amino acid corresponding to amino acid Y164 HEPN domain 1 of Prevotella buccae Cas13b (PbCas13b), preferably Y164A, Y164F, or Y164W. In some cases, the Cas13 protein comprises one or more mutations of an amino acid corresponding to the following amino acids of Prevotella buccae Cas13b (PbCas13b): T405, H407, K457, D434, K431, R402, K393, R482, N480, D396, E397, D398, or E399.

[0585] In some cases, the Cas13 protein comprises in the LID domain one or more mutations of an amino acid corresponding to the following amino acids in the LID domain of Prevotella buccae Cas13b (PbCas13b): T405, H407, K457, D434, K431, R402, K393, R482, N480, D396, E397, D398, or E399. In some cases, the Cas13 protein comprises a mutation of an amino acid corresponding to amino acid H407 of Prevotella buccae Cas13b (PbCas13b), preferably H407Y, H407W, or H407F. In some cases, the Cas13 protein comprises one or more mutations of an amino acid corresponding to the following amino acids of Prevotella buccae Cas13b (PbCas13b): R402, K393, R482, N480, D396, E397, D398, or E399. In some cases, the Cas13 protein comprises in the LID domain one or more mutations of an amino acid corresponding to the following amino acids in the LID domain of Prevotella buccae Cas13b (PbCas13b): R402, K393, R482, N480, D396, E397, D398, or E399. In some cases, the Cas13 protein comprises one or more mutations of an amino acid corresponding to the following amino acids of Prevotella buccae Cas13b (PbCas13b): K457, D434, or K431. In some cases, the Cas13 protein comprises in the LID domain one or more mutations of an amino acid corresponding to the following amino acids in the LID domain of Prevotella buccae Cas13b (PbCas13b): K457, D434, or K431.

[0586] In some cases, the Cas13 protein comprises one or more mutations of an amino acid corresponding to the following amino acids of Prevotella buccae Cas13b (PbCas13b): H500, K570, K590, N634, R638, N652, N653, K655, S658, K741, K744, N756, S757, R762, R791, K846, K857, K870, R877, R600, K607, K612, R614, K617, K826, K828, K829, R824, R830, Q831, K835, K836, R838, R618, Q646, N647, N653, or N652. In some cases, the Cas13 protein comprises in a helical domain one or more mutations of an amino acid corresponding to the following amino acids in a helical domain of Prevotella buccae Cas13b (PbCas13b): H500, K570, K590, N634, R638, N652, N653, K655, S658, K741, K744, N756, S757, R762, R791, K846, K857, K870, R877, R600, K607, K612, R614, K617, K826, K828, K829, R824, R830, Q831, K835, K836, R838, R618, Q646, N647, N653, or N652. In some cases, the Cas13 protein comprises one or more mutations of an amino acid corresponding to the following amino acids of Prevotella buccae Cas13b (PbCas13b): H500, K570, N756, S757, R762, R791, K846, K857, K870, R877, K826, K828, K829, R824, R830, Q831, K835, K836, or R838. In some cases, the Cas13 protein comprises in helical domain 1 one or more mutations of an amino acid corresponding to the following amino acids in helical domain 1 of Prevotella buccae Cas13b (PbCas13b): H500, K570, N756, S757, R762, R791, K846, K857, K870, R877, K826, K828, K829, R824, R830, Q831, K835, K836, or R838.

[0587] In some cases, the Cas13 protein comprises one or more mutations of an amino acid corresponding to the following amino acids of Prevotella buccae Cas13b (PbCas13b): H500, K570, N756, S757, R762, or R791. In some cases, the Cas13 protein comprises in helical domain 1 one or more mutations of an amino acid corresponding to the following amino acids in helical domain 1 of Prevotella buccae Cas13b (PbCas13b): H500, K570, N756, S757, R762, or R791. In some cases, the Cas13 protein comprises one or more mutations of an amino acid corresponding to the following amino acids of Prevotella buccae Cas13b (PbCas13b): K846, K857, K870, R877, K826, K828, K829, R824, R830, Q831, K835, K836, or R838. In some cases, the Cas13 protein comprises in the helical bridge domain one or more mutations of an amino acid corresponding to the following amino acids in the helical bridge domain of Prevotella buccae Cas13b (PbCas13b): K846, K857, K870, R877, K826, K828, K829, R824, R830, Q831, K835, K836, or R838. In some cases, the Cas13 protein comprises one or more mutations of an amino acid corresponding to the following amino acids of Prevotella buccae Cas13b (PbCas13b): H500 or K570. In some cases, the Cas13 protein comprises in helical domain 1-2 one or more mutations of an amino acid corresponding to the following amino acids in helical domain 1-2 of Prevotella buccae Cas13b (PbCas13b): H500 or K570.

[0588] In some cases, the Cas13 protein comprises one or more mutations of an amino acid corresponding to the following amino acids of Prevotella buccae Cas13b (PbCas13b): N756, S757, R762, R791, K846, K857, K870, R877, K826, K828, K829, R824, R830, Q831, K835, K836, or R838. In some cases, the Cas13 protein comprises in helical domain 1-3 one or more mutations of an amino acid corresponding to the following amino acids in helical domain 1-3 of Prevotella buccae Cas13b (PbCas13b): N756, S757, R762, R791, K846, K857, K870, R877, K826, K828, K829, R824, R830, Q831, K835, K836, or R838. In some cases, the Cas13 protein comprises one or more mutations of an amino acid corresponding to the following amino acids of Prevotella buccae Cas13b (PbCas13b): N756, S757, R762, or R791. In some cases, the Cas13 protein comprises in helical domain 1-3 one or more mutations of an amino acid corresponding to the following amino acids in helical domain 1-3 of Prevotella buccae Cas13b (PbCas13b): N756, S757, R762, or R791. In some cases, the Cas13 protein comprises one or more mutations of an amino acid corresponding to the following amino acids of Prevotella buccae Cas13b (PbCas13b): N756, S757, R762, R791, K846, K857, K870, or R877. In some cases, the Cas13 protein comprises in helical domain 1-3 one or more mutations of an amino acid corresponding to the following amino acids in helical domain 1-3 of Prevotella buccae Cas13b (PbCas13b): N756, S757, R762, R791, K846, K857, K870, or R877.

[0589] In some cases, the Cas13 protein comprises one or more mutations of an amino acid corresponding to the following amino acids of Prevotella buccae Cas13b (PbCas13b): K826, K828, K829, R824, R830, Q831, K835, K836, or R838. In some cases, the Cas13 protein comprises in helical domain 1-3 one or more mutations of an amino acid corresponding to the following amino acids in helical domain 1-3 of Prevotella buccae Cas13b (PbCas13b): K826, K828, K829, R824, R830, Q831, K835, K836, or R838.

[0590] In some cases, the Cas13 protein comprises one or more mutations of an amino acid corresponding to the following amino acids of Prevotella buccae Cas13b (PbCas13b): K590, N634, R638, N652, N653, K655, S658, K741, K744, R600, K607, K612, R614, K617, R618, Q646, N647, N653, or N652. In some cases, the Cas13 protein comprises in helical domain 2 one or more mutations of an amino acid corresponding to the following amino acids in helical domain 2 of Prevotella buccae Cas13b (PbCas13b): K590, N634, R638, N652, N653, K655, S658, K741, K744, R600, K607, K612, R614, K617, R618, Q646, N647, N653, or N652. In some cases, the Cas13 protein comprises one or more mutations of an amino acid corresponding to the following amino acids of Prevotella buccae Cas13b (PbCas13b): Q646 or N647. In some cases, the Cas13 protein comprises in helical domain 2 one or more mutations of an amino acid corresponding to the following amino acids in helical domain 2 of Prevotella buccae Cas13b (PbCas13b): Q646 or N647. In some cases, the Cas13 protein comprises one or more mutations of an amino acid corresponding to the following amino acids of Prevotella buccae Cas13b (PbCas13b): N653 or N652. In some cases, the Cas13 protein comprises in helical domain 2 one or more mutations of an amino acid corresponding to the following amino acids in helical domain 2 of Prevotella buccae Cas13b (PbCas13b): N653 or N652. In some cases, the Cas13 protein comprises one or more mutations of an amino acid corresponding to the following amino acids of Prevotella buccae Cas13b (PbCas13b): K590, N634, R638, N652, N653, K655, S658, K741, or K744. In some cases, the Cas13 protein comprises in helical domain 2 one or more mutations of an amino acid corresponding to the following amino acids in helical domain 2 of Prevotella buccae Cas13b (PbCas13b): K590, N634, R638, N652, N653, K655, S658, K741, or K744. In some cases, the Cas13 protein comprises one or more mutations of an amino acid corresponding to the following amino acids of Prevotella buccae Cas13b (PbCas13b): R600, K607, K612, R614, K617, or R618. In some cases, the Cas13 protein comprises in helical domain 2 one or more mutations of an amino acid corresponding to the following amino acids in helical domain 2 of Prevotella buccae Cas13b (PbCas13b): R600, K607, K612, R614, K617, or R618. In some cases, the Cas13 protein comprises one or more mutations of an amino acid corresponding to the following amino acids of Prevotella buccae Cas13b (PbCas13b): R285, R287, K292, E296, N297, or K294. In some cases, the Cas13 protein comprises in the IDL domain one or more mutations of an amino acid corresponding to the following amino acids in the IDL domain of Prevotella buccae Cas13b (PbCas13b): R285, R287, K292, E296, N297, or K294. In some cases, the Cas13 protein comprises one or more mutations of an amino acid corresponding to the following amino acids of Prevotella buccae Cas13b (PbCas13b): R285, K292, E296, or N297. In some cases, the Cas13 protein comprises in the IDL domain one or more mutations of an amino acid corresponding to the following amino acids in the IDL domain of Prevotella buccae Cas13b (PbCas13b): R285, K292, E296, or N297.

[0591] In some cases, the Cas13 protein comprises one or more mutations of an amino acid corresponding to the following amino acids of Prevotella buccae Cas13b (PbCas13b): T405, H500, K570, K590, N634, R638, N652, N653, K655, S658, K741, K744, N756, S757, R762, R791, K846, K857, K870, R877, K183, K193, R600, K607, K612, R614, K617, K826, K828, K829, R824, R830, Q831, K835, K836, R838, R618, D434, K431, R285, R287, K292, E296, N297, Q646, N647, or K294. In some cases, the Cas13 protein comprises one or more mutations of an amino acid corresponding to the following amino acids of Prevotella buccae Cas13b (PbCas13b): R402, K393, N653, N652, R482, N480, D396, E397, D398, or E399. In some cases, the Cas13 protein comprises one or more mutations of an amino acid corresponding to the following amino acids of Prevotella buccae Cas13b (PbCas13b): R53, K655, R762, or R1041; preferably R53A or R53D; K655A; R762A; or R1041E or R1041D. In some cases, the Cas13 protein comprises one or more mutations of an amino acid corresponding to the following amino acids of Prevotella buccae Cas13b (PbCas13b): N297, E296, K292, or R285; preferably N297A, E296A, K292A, or R285A. In some cases, the Cas13 protein comprises in (e.g., the central channel of) the IDL domain one or more mutations of an amino acid corresponding to the following amino acids in (e.g., the central channel of) the IDL domain of Prevotella buccae Cas13b (PbCas13b): N297, E296, K292, or R285; preferably N297A, E296A, K292A, or R285A. In some cases, the Cas13 protein comprises one or more mutations of an amino acid corresponding to the following amino acids of Prevotella buccae Cas13b (PbCas13b): Q831, K836, R838, N652, N653, R830, K655 or R762; preferably Q831A, K836A, R838A, N652A, N653A, R830A, K655A, or R762A.

[0592] In some cases, the Cas13 protein comprises one or more mutations of an amino acid corresponding to the following amino acids of Prevotella buccae Cas13b (PbCas13b): N652, N653, R830, K655 or R762; preferably N652A, N653A, R830A, K655A, or R762A. In some cases, the Cas13 protein comprises one or more mutations of an amino acid corresponding to the following amino acids of Prevotella buccae Cas13b (PbCas13b): K655 or R762; preferably K655A or R762A. In some cases, the Cas13 protein comprises in a helical domain one or more mutations of an amino acid corresponding to the following amino acids in a helical domain of Prevotella buccae Cas13b (PbCas13b): Q831, K836, R838, N652, N653, R830, K655 or R762; preferably Q831A, K836A, R838A, N652A, N653A, R830A, K655A, or R762A. In some cases, the Cas13 protein comprises a helical domain one or more mutations of an amino acid corresponding to the following amino acids a helical domain of Prevotella buccae Cas13b (PbCas13b): N652, N653, R830, K655 or R762; preferably N652A, N653A, R830A, K655A, or R762A.

[0593] In some cases, the Cas13 protein comprises in helical domain 2 one or more mutations of an amino acid corresponding to the following amino acids in helical domain 2 of Prevotella buccae Cas13b (PbCas13b): K655 or R762; preferably K655A or R762A. In some cases, the Cas13 protein comprises one or more mutations of an amino acid corresponding to the following amino acids of Prevotella buccae Cas13b (PbCas13b): R614, K607, K193, K183 or R600; preferably R614A, K607A, K193A, K183A or R600A. In some cases, the Cas13 protein comprises in the trans-subunit loop of helical domain 2 one or more mutations of an amino acid corresponding to the following amino acids in the trans-subunit loop of helical domain 2 of Prevotella buccae Cas13b (PbCas13b): Q646 or N647; preferably Q646A or N647A. In some cases, the Cas13 protein comprises one or more mutations of an amino acid corresponding to the following amino acids of Prevotella buccae Cas13b (PbCas13b): R53 or R1041; preferably R53A or R53D, or R1041E or R1041D. In some cases, the Cas13 protein comprises in a HEPN domain one or more mutations of an amino acid corresponding to the following amino acids in a HEPN domain of Prevotella buccae Cas13b (PbCas13b): R53 or R1041; preferably R53A or R53D, or R1041E or R1041D. In some cases, the Cas13 protein comprises one or more mutations of an amino acid corresponding to the following amino acids of Prevotella buccae Cas13b (PbCas13b): K457, D397, E398, D399, E400, T405, H407 or D434; preferably D397A, E398A, D399A, E400A, T405A, H407A, H407W, H407Y, H407F or D434A. In some cases, the Cas13 protein comprises in the LID domain one or more mutations of an amino acid corresponding to the following amino acids in the LID domain of Prevotella buccae Cas13b (PbCas13b): K457, D397, E398, D399, E400, T405, H407 or D434; preferably D397A, E398A, D399A, E400A, T405A, H407A, H407W, H407Y, H407F or D434A.

[0594] In some cases, the Cas13 protein comprises a mutation of an amino acid corresponding to amino acid T405 of Prevotella buccae Cas13b (PbCas13b). In some cases, the Cas13 protein comprises a mutation of an amino acid corresponding to amino acid H407 of Prevotella buccae Cas13b (PbCas13b). In some cases, the Cas13 protein comprises a mutation of an amino acid corresponding to amino acid K457 of Prevotella buccae Cas13b (PbCas13b). In some cases, the Cas13 protein comprises a mutation of an amino acid corresponding to amino acid H500 of Prevotella buccae Cas13b (PbCas13b). In some cases, the Cas13 protein comprises a mutation of an amino acid corresponding to amino acid K570 of Prevotella buccae Cas13b (PbCas13b). In some cases, the Cas13 protein comprises a mutation of an amino acid corresponding to amino acid K590 of Prevotella buccae Cas13b (PbCas13b). In some cases, the Cas13 protein comprises a mutation of an amino acid corresponding to amino acid N634 of Prevotella buccae Cas13b (PbCas13b). In some cases, the Cas13 protein comprises a mutation of an amino acid corresponding to amino acid R638 of Prevotella buccae Cas13b (PbCas13b). In some cases, the Cas13 protein comprises a mutation of an amino acid corresponding to amino acid N652 of Prevotella buccae Cas13b (PbCas13b). In some cases, the Cas13 protein comprises a mutation of an amino acid corresponding to amino acid N653 of Prevotella buccae Cas13b (PbCas13b). In some cases, the Cas13 protein comprises a mutation of an amino acid corresponding to amino acid K655 of Prevotella buccae Cas13b (PbCas13b). In some cases, the Cas13 protein comprises a mutation of an amino acid corresponding to amino acid S658 of Prevotella buccae Cas13b (PbCas13b). In some cases, the Cas13 protein comprises a mutation of an amino acid corresponding to amino acid K741 of Prevotella buccae Cas13b (PbCas13b). In some cases, the Cas13 protein comprises a mutation of an amino acid corresponding to amino acid K744 of Prevotella buccae Cas13b (PbCas13b). In some cases, the Cas13 protein comprises a mutation of an amino acid corresponding to amino acid N756 of Prevotella buccae Cas13b (PbCas13b). In some cases, the Cas13 protein comprises a mutation of an amino acid corresponding to amino acid S757 of Prevotella buccae Cas13b (PbCas13b). In some cases, the Cas13 protein comprises a mutation of an amino acid corresponding to amino acid R762 of Prevotella buccae Cas13b (PbCas13b). In some cases, the Cas13 protein comprises a mutation of an amino acid corresponding to amino acid R791 of Prevotella buccae Cas13b (PbCas13b). In some cases, the Cas13 protein comprises a mutation of an amino acid corresponding to amino acid K846 of Prevotella buccae Cas13b (PbCas13b). In some cases, the Cas13 protein comprises a mutation of an amino acid corresponding to amino acid K857 of Prevotella buccae Cas13b (PbCas13b). In some cases, the Cas13 protein comprises a mutation of an amino acid corresponding to amino acid K870 of Prevotella buccae Cas13b (PbCas13b). In some cases, the Cas13 protein comprises a mutation of an amino acid corresponding to amino acid R877 of Prevotella buccae Cas13b (PbCas13b). In some cases, the Cas13 protein comprises a mutation of an amino acid corresponding to amino acid K183 of Prevotella buccae Cas13b (PbCas13b). In some cases, the Cas13 protein comprises a mutation of an amino acid corresponding to amino acid K193 of Prevotella buccae Cas13b (PbCas13b). In some cases, the Cas13 protein comprises a mutation of an amino acid corresponding to amino acid R600 of Prevotella buccae Cas13b (PbCas13b). In some cases, the Cas13 protein comprises a mutation of an amino acid corresponding to amino acid K607 of Prevotella buccae Cas13b (PbCas13b). In some cases, the Cas13 protein comprises a mutation of an amino acid corresponding to amino acid K612 of Prevotella buccae Cas13b (PbCas13b). In some cases, the Cas13 protein comprises a mutation of an amino acid corresponding to amino acid R614 of Prevotella buccae Cas13b (PbCas13b). In some cases, the Cas13 protein comprises a mutation of an amino acid corresponding to amino acid K617 of Prevotella buccae Cas13b (PbCas13b). In some cases, the Cas13 protein comprises a mutation of an amino acid corresponding to amino acid K826 of Prevotella buccae Cas13b (PbCas13b). In some cases, the Cas13 protein comprises a mutation of an amino acid corresponding to amino acid K828 of Prevotella buccae Cas13b (PbCas13b). In some cases, the Cas13 protein comprises a mutation of an amino acid corresponding to amino acid K829 of Prevotella buccae Cas13b (PbCas13b). In some cases, the Cas13 protein comprises a mutation of an amino acid corresponding to amino acid R824 of Prevotella buccae Cas13b (PbCas13b). In some cases, the Cas13 protein comprises a mutation of an amino acid corresponding to amino acid R830 of Prevotella buccae Cas13b (PbCas13b). In some cases, the Cas13 protein comprises a mutation of an amino acid corresponding to amino acid Q831 of Prevotella buccae Cas13b (PbCas13b).

[0595] In some cases, the Cas13 protein comprises a mutation of an amino acid corresponding to amino acid K835 of Prevotella buccae Cas13b (PbCas13b). In some cases, the Cas13 protein comprises a mutation of an amino acid corresponding to amino acid K836 of Prevotella buccae Cas13b (PbCas13b). In some cases, the Cas13 protein comprises a mutation of an amino acid corresponding to amino acid R838 of Prevotella buccae Cas13b (PbCas13b). In some cases, the Cas13 protein comprises a mutation of an amino acid corresponding to amino acid R618 of Prevotella buccae Cas13b (PbCas13b). In some cases, the Cas13 protein comprises a mutation of an amino acid corresponding to amino acid D434 of Prevotella buccae Cas13b (PbCas13b). In some cases, the Cas13 protein comprises a mutation of an amino acid corresponding to amino acid K431 of Prevotella buccae Cas13b (PbCas13b). In some cases, the Cas13 protein comprises a mutation of an amino acid corresponding to amino acid R53 of Prevotella buccae Cas13b (PbCas13b). In some cases, the Cas13 protein comprises a mutation of an amino acid corresponding to amino acid K943 of Prevotella buccae Cas13b (PbCas13b). In some cases, the Cas13 protein comprises a mutation of an amino acid corresponding to amino acid R1041 of Prevotella buccae Cas13b (PbCas13b). In some cases, the Cas13 protein comprises a mutation of an amino acid corresponding to amino acid Y164 of Prevotella buccae Cas13b (PbCas13b). In some cases, the Cas13 protein comprises a mutation of an amino acid corresponding to amino acid R285 of Prevotella buccae Cas13b (PbCas13b). In some cases, the Cas13 protein comprises a mutation of an amino acid corresponding to amino acid R287 of Prevotella buccae Cas13b (PbCas13b). In some cases, the Cas13 protein comprises a mutation of an amino acid corresponding to amino acid K292 of Prevotella buccae Cas13b (PbCas13b). In some cases, the Cas13 protein comprises a mutation of an amino acid corresponding to amino acid E296 of Prevotella buccae Cas13b (PbCas13b). In some cases, the Cas13 protein comprises a mutation of an amino acid corresponding to amino acid N297 of Prevotella buccae Cas13b (PbCas13b). In some cases, the Cas13 protein comprises a mutation of an amino acid corresponding to amino acid Q646 of Prevotella buccae Cas13b (PbCas13b).

[0596] In some cases, the Cas13 protein comprises a mutation of an amino acid corresponding to amino acid N647 of Prevotella buccae Cas13b (PbCas13b). In some cases, the Cas13 protein comprises a mutation of an amino acid corresponding to amino acid R402 of Prevotella buccae Cas13b (PbCas13b). In some cases, the Cas13 protein comprises a mutation of an amino acid corresponding to amino acid K393 of Prevotella buccae Cas13b (PbCas13b). In some cases, the Cas13 protein comprises a mutation of an amino acid corresponding to amino acid N653 of Prevotella buccae Cas13b (PbCas13b). In some cases, the Cas13 protein comprises a mutation of an amino acid corresponding to amino acid N652 of Prevotella buccae Cas13b (PbCas13b). In some cases, the Cas13 protein comprises a mutation of an amino acid corresponding to amino acid R482 of Prevotella buccae Cas13b (PbCas13b). In some cases, the Cas13 protein comprises a mutation of an amino acid corresponding to amino acid N480 of Prevotella buccae Cas13b (PbCas13b). In some cases, the Cas13 protein comprises a mutation of an amino acid corresponding to amino acid D396 of Prevotella buccae Cas13b (PbCas13b). In some cases, the Cas13 protein comprises a mutation of an amino acid corresponding to amino acid E397 of Prevotella buccae Cas13b (PbCas13b). In some cases, the Cas13 protein comprises a mutation of an amino acid corresponding to amino acid D398 of Prevotella buccae Cas13b (PbCas13b). In some cases, the Cas13 protein comprises a mutation of an amino acid corresponding to amino acid E399 of Prevotella buccae Cas13b (PbCas13b). In some cases, the Cas13 protein comprises a mutation of an amino acid corresponding to amino acid K294 of Prevotella buccae Cas13b (PbCas13b). In some cases, the Cas13 protein comprises a mutation of an amino acid corresponding to amino acid E400 of Prevotella buccae Cas13b (PbCas13b). In some cases, the Cas13 protein comprises a mutation of an amino acid corresponding to amino acid R56 of Prevotella buccae Cas13b (PbCas13b). In some cases, the Cas13 protein comprises a mutation of an amino acid corresponding to amino acid N157 of Prevotella buccae Cas13b (PbCas13b). In some cases, the Cas13 protein comprises a mutation of an amino acid corresponding to amino acid H161 of Prevotella buccae Cas13b (PbCas13b). In some cases, the Cas13 protein comprises a mutation of an amino acid corresponding to amino acid H452 of Prevotella buccae Cas13b (PbCas13b). In some cases, the Cas13 protein comprises a mutation of an amino acid corresponding to amino acid N455 of Prevotella buccae Cas13b (PbCas13b). In some cases, the Cas13 protein comprises a mutation of an amino acid corresponding to amino acid K484 of Prevotella buccae Cas13b (PbCas13b). In some cases, the Cas13 protein comprises a mutation of an amino acid corresponding to amino acid N486 of Prevotella buccae Cas13b (PbCas13b). In some cases, the Cas13 protein comprises a mutation of an amino acid corresponding to amino acid G566 of Prevotella buccae Cas13b (PbCas13b). In some cases, the Cas13 protein comprises a mutation of an amino acid corresponding to amino acid H567 of Prevotella buccae Cas13b (PbCas13b). In some cases, the Cas13 protein comprises a mutation of an amino acid corresponding to amino acid A656 of Prevotella buccae Cas13b (PbCas13b). In some cases, the Cas13 protein comprises a mutation of an amino acid corresponding to amino acid V795 of Prevotella buccae Cas13b (PbCas13b). In some cases, the Cas13 protein comprises a mutation of an amino acid corresponding to amino acid A796 of Prevotella buccae Cas13b (PbCas13b). In some cases, the Cas13 protein comprises a mutation of an amino acid corresponding to amino acid W842 of Prevotella buccae Cas13b (PbCas13b). In some cases, the Cas13 protein comprises a mutation of an amino acid corresponding to amino acid K871 of Prevotella buccae Cas13b (PbCas13b). In some cases, the Cas13 protein comprises a mutation of an amino acid corresponding to amino acid E873 of Prevotella buccae Cas13b (PbCas13b). In some cases, the Cas13 protein comprises a mutation of an amino acid corresponding to amino acid R874 of Prevotella buccae Cas13b (PbCas13b). In some cases, the Cas13 protein comprises a mutation of an amino acid corresponding to amino acid R1068 of Prevotella buccae Cas13b (PbCas13b). In some cases, the Cas13 protein comprises a mutation of an amino acid corresponding to amino acid N1069 of Prevotella buccae Cas13b (PbCas13b). In some cases, the Cas13 protein comprises a mutation of an amino acid corresponding to amino acid H1073 of Prevotella buccae Cas13b (PbCas13b).

[0597] In some cases, the Cas13 protein comprises one or more mutations of an amino acid corresponding to the following amino acids of Leptotrichia shahii Cas13a (LshCas13a): R597, N598, H602, R1278, N1279, or H1283. The present disclosure also includes a mutated Cas13 protein comprising one or more mutations of an amino acid corresponding to the following amino acids of Leptotrichia shahii Cas13a (LshCas13a): R597, N598, H602, R1278, N1279, or H1283. In some cases, the Cas13 protein comprises in a HEPN domain one or more mutations of an amino acid corresponding to the following amino acids in a HEPN domain of Leptotrichia shahii Cas13a (LshCas13a): R597, N598, H602, R1278, N1279, or H1283. In some cases, the Cas13 protein comprises one or more mutations of an amino acid corresponding to the following amino acids of Leptotrichia shahii Cas13a (LshCas13a): R597, N598, or H602. In some cases, the Cas13 protein comprises in HEPN domain 1 one or more mutation of an amino acid corresponding to the following amino acids in HEPN domain 1 of Leptotrichia shahii Cas13a (LshCas13a): R597, N598, or H602. In some cases, the Cas13 protein comprises one or more mutations of an amino acid corresponding to the following amino acids of Leptotrichia shahii Cas13a (LshCas13a): R1278, N1279, or H1283. In some cases, the Cas13 protein comprises in HEPN domain 2 one or more mutations of an amino acid corresponding to the following amino acids in HEPN domain 2 of Leptotrichia shahii Cas13a (LshCas13a): R1278, N1279, or H1283. In some cases, the Cas13 protein comprises one or more mutations of an amino acid corresponding to the following amino acids of Porphyromonas gulae Cas13b (PguCas13b): R146, H151, R1116, or H1121. In some cases, the Cas13 protein comprises one or more mutations of an amino acid corresponding to the following amino acids of Porphyromonas gulae Cas13b (PguCas13b): R146, H151, R1116, or H1121. In some cases, the Cas13 protein comprises in a HEPN domain one or more mutations of an amino acid corresponding to the following amino acids in a HEPN domain of Porphyromonas gulae Cas13b (PguCas13b): R146, H151, R1116, or H1121.

[0598] In some cases, the Cas13 protein comprises one or more mutations of an amino acid corresponding to the following amino acids of Porphyromonas gulae Cas13b (PguCas13b): R146 or H151. In some cases, the Cas13 protein comprises in HEPN domain 1 one or more mutations of an amino acid corresponding to the following amino acids in HEPN domain 1 of Porphyromonas gulae Cas13b (PguCas13b): R146 or H151. In some cases, the Cas13 protein comprises one or more mutations of an amino acid corresponding to the following amino acids of Porphyromonas gulae Cas13b (PguCas13b): R1116 or H1121. In some cases, the Cas13 protein comprises in HEPN domain 2 one or more mutations of an amino acid corresponding to the following amino acids in HEPN domain 2 of Porphyromonas gulae Cas13b (PguCas13b): R1116 or H1121. In some cases, the Cas13 protein comprises one or more mutations of an amino acid corresponding to the following amino acids of Prevotella sp. P5-125 Cas13b (PspCas13b): H133 or H1058. The present disclosure also provides a mutated Cas13 protein comprising one or more mutations of an amino acid corresponding to the following amino acids of Prevotella sp. P5-125 Cas13b (PspCas13b): H133 or H1058. In some cases, the Cas13 protein comprises in a HEPN domain one or more mutations of an amino acid corresponding to the following amino acids in a HEPN domain of Prevotella sp. P5-125 Cas13b (PspCas13b): H133 or H1058.

[0599] In some cases, the Cas13 protein comprises a mutation of an amino acid corresponding to amino acid H133 of Prevotella sp. P5-125 Cas13b (PspCas13b). In some cases, the Cas13 protein comprises in HEPN domain 1 a mutation of an amino acid corresponding to amino acid H133 in HEPN domain 1 of Prevotella sp. P5-125 Cas13b (PspCas13b). In some cases, the Cas13 protein comprises a mutation of an amino acid corresponding to amino acid H1058 of Prevotella sp. P5-125 Cas13b (PspCas13b). In some cases, the Cas13 protein comprises in HEPN domain 2 a mutation of an amino acid corresponding to the amino acid H1058 in HEPN domain 2 of Prevotella sp. P5-125 Cas13b (PspCas13b).

[0600] The CRISPR-Cas protein herein may comprise one or more amino acids mutated. In some embodiments, the amino acid is mutated to A, P, or V, preferably A. In some embodiments, the amino acid is mutated to a hydrophobic amino acid. In some embodiments, the amino acid is mutated to an aromatic amino acid. In some embodiments, the amino acid is mutated to a charged amino acid. In some embodiments, the amino acid is mutated to a positively charged amino acid. In some embodiments, the amino acid is mutated to a negatively charged amino acid. In some embodiments, the amino acid is mutated to a polar amino acid. In some embodiments, the amino acid is mutated to an aliphatic amino acid.

[0601] The present disclosure also provides for methods of altering activity of CRISPR-Cas proteins. In some examples, such methods comprise identifying one or more candidate amino acids in the Cas13 protein based on a three-dimensional structure of at least a portion of the Cas 13 protein, wherein the one or more candidate amino acids interact with a guide RNA that forms a complex with the Cas13 protein; or are in a HEPN active site, an inter-domain linker domain, or a bridge helix domain of the Cas13 protein; and mutating the one or more candidate amino acids thereby generating a mutated Cas13 protein, wherein activity the mutated Cas13 protein is different than the Cas13 protein.

### Destabilized Cas13 and Fusion Proteins

[0602] In certain embodiments, the effector protein according to the invention as described herein is associated with or fused to a destabilization domain (DD). In some embodiments, the DD is ER50. A corresponding stabilizing ligand for this DD is, in some embodiments, 4HT. As such, in some embodiments, one of the at least one DDs is ER50 and a stabilizing ligand therefor is 4HT or CMP8. In some embodiments, the DD is DHFR50. A corresponding stabilizing ligand for this DD is, in some embodiments, TMP. As such, in some embodiments, one of the at least one DDs is DHFR50 and a stabilizing ligand therefor is TMP. In some embodiments, the DD is ER50. A corresponding stabilizing ligand for this DD is, in some embodiments, CMP8. CMP8 may therefore be an alternative stabilizing ligand to 4HT in the ER50 system. While it may be possible that CMP8 and 4HT can/should be used in a competitive matter, some cell types may be more susceptible to one or the other of these two ligands, and from this disclosure and the knowledge in the art the skilled person can use CMP8 and/or 4HT.

[0603] In some embodiments, one or two DDs may be fused to the N-terminal end of the Cas13 with one or two DDs fused to the C-terminal of the Cas13. In some embodiments, the at least two DDs are associated with the Cas13 and the DDs are the same DD, i.e. the DDs are homologous. Thus, both (or two or more) of the DDs could be ER50 DDs. This is preferred in some embodiments. Alternatively, both (or two or more) of the DDs could be DHFR50 DDs. This is also preferred in some embodiments. In some embodiments, the at least two DDs are associated with the Cas13 and the DDs are different DDs, i.e. the DDs are heterologous. Thus, one of the DDS could be ER50 while one or more of the DDs or any other DDs could be DHFR50. Having two or more DDs which are heterologous may be advantageous as it would provide a greater level of degradation control. A tandem fusion of more than one DD at the N or C-term may enhance degradation; and such a tandem fusion can be, for example ER50-ER50-Cas13 or DHFR-DHFR-Cas13 It is envisaged that high levels of degradation would occur in the absence of either stabilizing ligand, intermediate levels of degradation would occur in the absence of one stabilizing ligand and the presence of the other (or another) stabilizing ligand, while low levels of degradation would occur in the presence of both (or two of more) of the stabilizing ligands. Control may also be imparted by having an N-terminal ER50 DD and a C-terminal DHFR50 DD.

[0604] In some embodiments, the fusion of the Cas13 with the DD comprises a linker between the DD and the Cas13. In some embodiments, the linker is a GlySer linker. In some embodiments, the DD-Cas13 further comprises at least one Nuclear Export Signal (NES). In some embodiments, the DD-Cas13 comprises two or more NESs. In some embodiments, the DD-Cas13 comprises at least one Nuclear Localization Signal (NLS). This may be in addition to an NES. In some embodiments, the Cas13 comprises or consists essentially of or consists of a localization (nuclear import or export) signal as, or as part of, the linker between the Cas13 and the DD. HA or Flag tags are also within the ambit of the invention as linkers. Applicants use NLS and/or NES as linker and also use Glycine Serine linkers as short as GS up to (GGGGS)3.

[0605] Destabilizing domains have general utility to confer instability to a wide range of proteins; see, e.g., Miyazaki, J Am Chem Soc. Mar. 7, 2012; 134(9): 3942-3945, incorporated herein by reference. CMP8 or 4-hydroxytamoxifen can be destabilizing domains. More generally, A temperature-sensitive mutant of mammalian DHFR (DHFRts), a destabilizing residue by the N-end rule, was found to be stable at a permissive temperature but unstable at 37° C. The addition of methotrexate, a high-affinity ligand for mammalian DHFR, to cells expressing DHFRts inhibited degradation of the protein partially. This was an important demonstration that a small molecule ligand can stabilize a protein otherwise targeted for degradation in cells. A rapamycin derivative was used to stabilize an unstable mutant of the FRB domain of mTOR (FRB*) and restore the function of the fused kinase, GSK-3β.6,7 This system demonstrated that ligand-dependent stability represented an attractive strategy to regulate the function of a specific protein in a complex biological environment. A system to control protein activity can involve the DD becoming functional when the ubiquitin complementation occurs by rapamycin induced dimerization of FK506-binding protein and FKBP12. Mutants of human FKBP12 or ecDHFR protein can be engineered to be metabolically unstable in the absence of their high-affinity ligands, Shield-1 or trimethoprim (TMP), respectively. These mutants are some of the possible destabilizing domains (DDs) useful in the practice of the invention and instability of a DD as a fusion with a Cas13 confers to the Cas13 degradation of the entire fusion protein by the proteasome. Shield-1 and TMP bind to and stabilize the DD in a dose-dependent manner. The estrogen receptor ligand binding domain (ERLBD, residues 305-549 of ERS1) can also be engineered as a destabilizing domain. Since the estrogen receptor signaling pathway is involved in a variety of diseases such as breast cancer, the pathway has been widely studied and numerous agonist and antagonists of estrogen receptor have been developed. Thus, compatible pairs of ERLBD and drugs are known. There are ligands that bind to mutant but not wild-type forms of the ERLBD. By using one of these mutant domains encoding three mutations (L384M, M421G, G521R)12, it is possible to regulate the stability of an ERLBD-derived DD using a ligand that does not perturb endogenous estrogen-sensitive networks. An additional mutation (Y537S) can be introduced to further destabilize the ERLBD and to configure it as a potential DD candidate. This tetra-mutant is an advantageous DD development. The mutant ERLBD can be fused to a Cas13 and its stability can be regulated or perturbed using a ligand, whereby the Cas13 has a DD. Another DD can be a 12-kDa (107-amino-acid) tag based on a mutated FKBP protein, stabilized by Shield1 ligand; see, e.g., Nature Methods 5, (2008). For instance a DD can be a modified FK506 binding protein 12 (FKBP12) that binds to and is reversibly stabilized by a synthetic, biologically inert small molecule, Shield-1; see, e.g., Banaszynski L A, Chen L C, Maynard-Smith L A, Ooi A G, Wandless T J. A rapid, reversible, and tunable method to regulate protein function in living cells using synthetic small molecules. Cell. 2006; 126:995-1004; Banaszynski L A, Sellmyer M A, Contag C H, Wandless T J, Thorne S H. Chemical control of protein stability and function in living mice. Nat Med. 2008; 14:1123-1127; Maynard-Smith L A, Chen L C, Banaszynski L A, Ooi A G, Wandless T J. A directed approach for engineering conditional protein stability using biologically silent small molecules. The Journal of biological chemistry. 2007; 282:24866-24872; and Rodriguez, Chem Biol. Mar. 23, 2012; 19(3): 391-398—all of which are incorporated herein by reference and may be employed in the practice of the invention in selected a DD to associate with a Cas13 in the practice of this invention. As can be seen, the knowledge in the art includes a number of DDs, and the DD can be associated with, e.g., fused to, advantageously with a linker, to a Cas13, whereby the DD can be stabilized in the presence of a ligand and when there is the absence thereof the DD can become destabilized, whereby the Cas13 is entirely destabilized, or the DD can be stabilized in the absence of a ligand and when the ligand is present the DD can become destabilized; the DD allows the Cas13 and hence the CRISPR-Cas13 complex or system to be regulated or controlled—turned on or off so to speak, to thereby provide means for regulation or control of the system, e.g., in an in vivo or in vitro environment. For instance, when a protein of interest is expressed as a fusion with the DD tag, it is destabilized and rapidly degraded in the cell, e.g., by proteasomes. Thus, absence of stabilizing ligand leads to a D associated Cas being degraded. When a new DD is fused to a protein of interest, its instability is conferred to the protein of interest, resulting in the rapid degradation of the entire fusion protein. Peak activity for Cas is sometimes beneficial to reduce off-target effects. Thus, short bursts of high activity are preferred. The present invention is able to provide such peaks. In some senses the system is inducible. In some other senses, the system repressed in the absence of stabilizing ligand and de-repressed in the presence of stabilizing ligand.

### Dead Cas Proteins

[0606] In certain embodiments, the effector protein herein is a catalytically inactive or dead Cas protein. In some cases, the effector protein (CRISPR enzyme; Cas13; effector protein) according to the invention as described herein is a catalytically inactive or dead Cas13 effector protein (dCas13). In some cases, a dead Cas protein, e.g., a dead Cas13 protein has nickase activity. In some embodiments, the dCas13 effector comprises mutations in the nuclease domain. In some embodiments, the dCas13 effector protein has been truncated. In some cases, the dead Cas proteins may be fused with a deaminase herein, e.g., an adenosine deaminase.

[0607] To reduce the size of a fusion protein of the Cas13 effector and the one or more functional domains, the C-terminus of the Cas13 effector can be truncated while still maintaining its RNA binding function. For example, at least 20 amino acids, at least 40 amino acids, at least 50 amino acids, at least 60 amino acids, at least 80 amino acids, at least 100 amino acids, at least 120 amino acids, at least 140 amino acids, at least 150 amino acids, at least 160 amino acids, at least 180 amino acids, at least 200 amino acids, at least 220 amino acids, at least 240 amino acids, at least 250 amino acids, at least 260 amino acids, or at least 300 amino acids, or at least 350 amino acids, or up to 120 amino acids, or up to 140 amino acids, or up to 160 amino acids, or up to 180 amino acids, or up to 200 amino acids, or up to 250 amino acids, or up to 300 amino acids, or up to 350 amino acids, or up to 400 amino acids, may be truncated at the C-terminus of the Cas13 effector. Specific examples of Cas13 truncations include C-terminal 4984-1090, C-terminal 41026-1090, and C-terminal 41053-1090, C-terminal 4934-1090, C-terminal 4884-1090, C-terminal 4834-1090, C-terminal 4784-1090, and C-terminal 4734-1090, wherein amino acid positions correspond to amino acid positions of Prevotella sp. P5-125 Cas13b protein. The skilled person will understand that similar truncations can be designed for other Cas13b orthologues, or other Cas13 types or subtypes, such as Cas13a, Cas13c, or Cas13d. In some cases, the truncated Cas13b is encoded by nt 1-984 of Prevotella sp. P5-125 Cas13b or the corresponding nt of a Cas13b orthologue or homologue. Examples of Cas13 truncations also include C-terminal Δ 795-1095, wherein amino acid positions correspond to amino acid positions of Riemerella anatipestifer Cas13b protein. Examples of Cas13 truncations further include C-terminal Δ 875-1175, C-terminal 895-1175, C-terminal Δ 915-1175, C-terminal Δ 935-1175, C-terminal Δ 955-1175, C-terminal 975-1175, C-terminal Δ 995-1175, C-terminal Δ 1015-1175, C-terminal Δ 1035-1175, C-terminal Δ 1055-1175, C-terminal Δ 1075-1175, C-terminal Δ 1095-1175, C-terminal Δ 1115-1175, C-terminal Δ 1135-1175, C-terminal Δ 1155-1175, wherein amino acid positions correspond to amino acid positions of Porphyromonas gulae Cas13b protein.

[0608] In some embodiments, the N-terminus of the Cas13 effector protein may be truncated. For example, at least 20 amino acids, at least 40 amino acids, at least 50 amino acids, at least 60 amino acids, at least 80 amino acids, at least 100 amino acids, at least 120 amino acids, at least 140 amino acids, at least 150 amino acids, at least 160 amino acids, at least 180 amino acids, at least 200 amino acids, at least 220 amino acids, at least 240 amino acids, at least 250 amino acids, at least 260 amino acids, or at least 300 amino acids, or at least 350 amino acids, or up to 120 amino acids, or up to 140 amino acids, or up to 160 amino acids, or up to 180 amino acids, or up to 200 amino acids, or up to 250 amino acids, or up to 300 amino acids, or up to 350 amino acids, or up to 400 amino acids, may be truncated at the N-terminus of the Cas13 effector. Examples of Cas13 truncations include N-terminal Δ41-125, N-terminal Δ 1-88, or N-terminal Δ1-72, wherein amino acid positions of the truncations correspond to amino acid positions of Prevotella sp. P5-125 Cas13b protein.

[0609] In some embodiments, both the N- and the C-termini of the Cas13 effector protein may be truncated. For example, at least 20 amino acids may be truncated at the C-terminus of the Cas13 effector, and at least 20 amino acids, at least 40 amino acids, at least 60 amino acids, at least 80 amino acids, at least 100 amino acids, at least 120 amino acids, at least 140 amino acids, at least 160 amino acids, at least 180 amino acids, at least 200 amino acids, at least 220 amino acids, at least 240 amino acids, at least 260 amino acids, at least 300 amino acids, or at least 350 amino acids may be truncated at the N-terminus of the Cas13 effector. For example, at least 40 amino acids may be truncated at the C-terminus of the Cas13 effector, and at least 20 amino acids, at least 40 amino acids, at least 60 amino acids, at least 80 amino acids, at least 100 amino acids, at least 120 amino acids, at least 140 amino acids, at least 160 amino acids, at least 180 amino acids, at least 200 amino acids, at least 220 amino acids, at least 240 amino acids, at least 260 amino acids, at least 300 amino acids, or at least 350 amino acids may be truncated at the N-terminus of the Cas13 effector. For example, at least 60 amino acids may be truncated at the C-terminus of the Cas13 effector, and at least 20 amino acids, at least 40 amino acids, at least 60 amino acids, at least 80 amino acids, at least 100 amino acids, at least 120 amino acids, at least 140 amino acids, at least 160 amino acids, at least 180 amino acids, at least 200 amino acids, at least 220 amino acids, at least 240 amino acids, at least 260 amino acids, at least 300 amino acids, or at least 350 amino acids may be truncated at the N-terminus of the Cas13 effector. For example, at least 80 amino acids may be truncated at the C-terminus of the Cas13 effector, and at least 20 amino acids, at least 40 amino acids, at least 60 amino acids, at least 80 amino acids, at least 100 amino acids, at least 120 amino acids, at least 140 amino acids, at least 160 amino acids, at least 180 amino acids, at least 200 amino acids, at least 220 amino acids, at least 240 amino acids, at least 260 amino acids, at least 300 amino acids, or at least 350 amino acids may be truncated at the N-terminus of the Cas13 effector. For example, at least 100 amino acids may be truncated at the C-terminus of the Cas13 effector, and at least 20 amino acids, at least 40 amino acids, at least 60 amino acids, at least 80 amino acids, at least 100 amino acids, at least 120 amino acids, at least 140 amino acids, at least 160 amino acids, at least 180 amino acids, at least 200 amino acids, at least 220 amino acids, at least 240 amino acids, at least 260 amino acids, at least 300 amino acids, or at least 350 amino acids may be truncated at the N-terminus of the Cas13 effector. For example, at least 120 amino acids may be truncated at the C-terminus of the Cas13 effector, and at least 20 amino acids, at least 40 amino acids, at least 60 amino acids, at least 80 amino acids, at least 100 amino acids, at least 120 amino acids, at least 140 amino acids, at least 160 amino acids, at least 180 amino acids, at least 200 amino acids, at least 220 amino acids, at least 240 amino acids, at least 260 amino acids, at least 300 amino acids, or at least 350 amino acids may be truncated at the N-terminus of the Cas13 effector. For example, at least 140 amino acids may be truncated at the C-terminus of the Cas13 effector, and at least 20 amino acids, at least 40 amino acids, at least 60 amino acids, at least 80 amino acids, at least 100 amino acids, at least 120 amino acids, at least 140 amino acids, at least 160 amino acids, at least 180 amino acids, at least 200 amino acids, at least 220 amino acids, at least 240 amino acids, at least 260 amino acids, at least 300 amino acids, or at least 350 amino acids may be truncated at the N-terminus of the Cas13 effector. For example, at least 160 amino acids may be truncated at the C-terminus of the Cas13 effector, and at least 20 amino acids, at least 40 amino acids, at least 60 amino acids, at least 80 amino acids, at least 100 amino acids, at least 120 amino acids, at least 140 amino acids, at least 160 amino acids, at least 180 amino acids, at least 200 amino acids, at least 220 amino acids, at least 240 amino acids, at least 260 amino acids, at least 300 amino acids, or at least 350 amino acids may be truncated at the N-terminus of the Cas13 effector. For example, at least 180 amino acids may be truncated at the C-terminus of the Cas13 effector, and at least 20 amino acids, at least 40 amino acids, at least 60 amino acids, at least 80 amino acids, at least 100 amino acids, at least 120 amino acids, at least 140 amino acids, at least 160 amino acids, at least 180 amino acids, at least 200 amino acids, at least 220 amino acids, at least 240 amino acids, at least 260 amino acids, at least 300 amino acids, or at least 350 amino acids may be truncated at the N-terminus of the Cas13 effector. For example, at least 200 amino acids may be truncated at the C-terminus of the Cas13 effector, and at least 20 amino acids, at least 40 amino acids, at least 60 amino acids, at least 80 amino acids, at least 100 amino acids, at least 120 amino acids, at least 140 amino acids, at least 160 amino acids, at least 180 amino acids, at least 200 amino acids, at least 220 amino acids, at least 240 amino acids, at least 260 amino acids, at least 300 amino acids, or at least 350 amino acids may be truncated at the N-terminus of the Cas13 effector. For example, at least 220 amino acids may be truncated at the C-terminus of the Cas13 effector, and at least 20 amino acids, at least 40 amino acids, at least 60 amino acids, at least 80 amino acids, at least 100 amino acids, at least 120 amino acids, at least 140 amino acids, at least 160 amino acids, at least 180 amino acids, at least 200 amino acids, at least 220 amino acids, at least 240 amino acids, at least 260 amino acids, at least 300 amino acids, or at least 350 amino acids may be truncated at the N-terminus of the Cas13 effector. For example, at least 240 amino acids may be truncated at the C-terminus of the Cas13 effector, and at least 20 amino acids, at least 40 amino acids, at least 60 amino acids, at least 80 amino acids, at least 100 amino acids, at least 120 amino acids, at least 140 amino acids, at least 160 amino acids, at least 180 amino acids, at least 200 amino acids, at least 220 amino acids, at least 240 amino acids, at least 260 amino acids, at least 300 amino acids, or at least 350 amino acids may be truncated at the N-terminus of the Cas13 effector. For example, at least 260 amino acids may be truncated at the C-terminus of the Cas13 effector, and at least 20 amino acids, at least 40 amino acids, at least 60 amino acids, at least 80 amino acids, at least 100 amino acids, at least 120 amino acids, at least 140 amino acids, at least 160 amino acids, at least 180 amino acids, at least 200 amino acids, at least 220 amino acids, at least 240 amino acids, at least 260 amino acids, at least 300 amino acids, or at least 350 amino acids may be truncated at the N-terminus of the Cas13 effector. For example, at least 280 amino acids may be truncated at the C-terminus of the Cas13 effector, and at least 20 amino acids, at least 40 amino acids, at least 60 amino acids, at least 80 amino acids, at least 100 amino acids, at least 120 amino acids, at least 140 amino acids, at least 160 amino acids, at least 180 amino acids, at least 200 amino acids, at least 220 amino acids, at least 240 amino acids, at least 260 amino acids, at least 300 amino acids, or at least 350 amino acids may be truncated at the N-terminus of the Cas13 effector. For example, at least 300 amino acids may be truncated at the C-terminus of the Cas13 effector, and at least 20 amino acids, at least 40 amino acids, at least 60 amino acids, at least 80 amino acids, at least 100 amino acids, at least 120 amino acids, at least 140 amino acids, at least 160 amino acids, at least 180 amino acids, at least 200 amino acids, at least 220 amino acids, at least 240 amino acids, at least 260 amino acids, at least 300 amino acids, or at least 350 amino acids may be truncated at the N-terminus of the Cas13 effector. For example, at least 350 amino acids may be truncated at the C-terminus of the Cas13 effector, and at least 20 amino acids, at least 40 amino acids, at least 60 amino acids, at least 80 amino acids, at least 100 amino acids, at least 120 amino acids, at least 140 amino acids, at least 160 amino acids, at least 180 amino acids, at least 200 amino acids, at least 220 amino acids, at least 240 amino acids, at least 260 amino acids, at least 300 amino acids, or at least 350 amino acids may be truncated at the N-terminus of the Cas13 effector. For example, at least 20 amino acids may be truncated at the N-terminus of the Cas13 effector, and at least 20 amino acids, at least 40 amino acids, at least 60 amino acids, at least 80 amino acids, at least 100 amino acids, at least 120 amino acids, at least 140 amino acids, at least 160 amino acids, at least 180 amino acids, at least 200 amino acids, at least 220 amino acids, at least 240 amino acids, at least 260 amino acids, at least 300 amino acids, or at least 350 amino acids may be truncated at the C-terminus of the Cas13 effector. For example, at least 40 amino acids may be truncated at the N-terminus of the Cas13 effector, and at least 20 amino acids, at least 40 amino acids, at least 60 amino acids, at least 80 amino acids, at least 100 amino acids, at least 120 amino acids, at least 140 amino acids, at least 160 amino acids, at least 180 amino acids, at least 200 amino acids, at least 220 amino acids, at least 240 amino acids, at least 260 amino acids, at least 300 amino acids, or at least 350 amino acids may be truncated at the C-terminus of the Cas13 effector. For example, at least 60 amino acids may be truncated at the N-terminus of the Cas13 effector, and at least 20 amino acids, at least 40 amino acids, at least 60 amino acids, at least 80 amino acids, at least 100 amino acids, at least 120 amino acids, at least 140 amino acids, at least 160 amino acids, at least 180 amino acids, at least 200 amino acids, at least 220 amino acids, at least 240 amino acids, at least 260 amino acids, at least 300 amino acids, or at least 350 amino acids may be truncated at the C-terminus of the Cas13 effector. For example, at least 80 amino acids may be truncated at the N-terminus of the Cas13 effector, and at least 20 amino acids, at least 40 amino acids, at least 60 amino acids, at least 80 amino acids, at least 100 amino acids, at least 120 amino acids, at least 140 amino acids, at least 160 amino acids, at least 180 amino acids, at least 200 amino acids, at least 220 amino acids, at least 240 amino acids, at least 260 amino acids, at least 300 amino acids, or at least 350 amino acids may be truncated at the C-terminus of the Cas13 effector. For example, at least 100 amino acids may be truncated at the N-terminus of the Cas13 effector, and at least 20 amino acids, at least 40 amino acids, at least 60 amino acids, at least 80 amino acids, at least 100 amino acids, at least 120 amino acids, at least 140 amino acids, at least 160 amino acids, at least 180 amino acids, at least 200 amino acids, at least 220 amino acids, at least 240 amino acids, at least 260 amino acids, at least 300 amino acids, or at least 350 amino acids may be truncated at the C-terminus of the Cas13 effector. For example, at least 120 amino acids may be truncated at the N-terminus of the Cas13 effector, and at least 20 amino acids, at least 40 amino acids, at least 60 amino acids, at least 80 amino acids, at least 100 amino acids, at least 120 amino acids, at least 140 amino acids, at least 160 amino acids, at least 180 amino acids, at least 200 amino acids, at least 220 amino acids, at least 240 amino acids, at least 260 amino acids, at least 300 amino acids, or at least 350 amino acids may be truncated at the C-terminus of the Cas13 effector. For example, at least 140 amino acids may be truncated at the N-terminus of the Cas13 effector, and at least 20 amino acids, at least 40 amino acids, at least 60 amino acids, at least 80 amino acids, at least 100 amino acids, at least 120 amino acids, at least 140 amino acids, at least 160 amino acids, at least 180 amino acids, at least 200 amino acids, at least 220 amino acids, at least 240 amino acids, at least 260 amino acids, at least 300 amino acids, or at least 350 amino acids may be truncated at the C-terminus of the Cas13 effector. For example, at least 160 amino acids may be truncated at the N-terminus of the Cas13 effector, and at least 20 amino acids, at least 40 amino acids, at least 60 amino acids, at least 80 amino acids, at least 100 amino acids, at least 120 amino acids, at least 140 amino acids, at least 160 amino acids, at least 180 amino acids, at least 200 amino acids, at least 220 amino acids, at least 240 amino acids, at least 260 amino acids, at least 300 amino acids, or at least 350 amino acids may be truncated at the C-terminus of the Cas13 effector. For example, at least 180 amino acids may be truncated at the N-terminus of the Cas13 effector, and at least 20 amino acids, at least 40 amino acids, at least 60 amino acids, at least 80 amino acids, at least 100 amino acids, at least 120 amino acids, at least 140 amino acids, at least 160 amino acids, at least 180 amino acids, at least 200 amino acids, at least 220 amino acids, at least 240 amino acids, at least 260 amino acids, at least 300 amino acids, or at least 350 amino acids may be truncated at the C-terminus of the Cas13 effector. For example, at least 200 amino acids may be truncated at the N-terminus of the Cas13 effector, and at least 20 amino acids, at least 40 amino acids, at least 60 amino acids, at least 80 amino acids, at least 100 amino acids, at least 120 amino acids, at least 140 amino acids, at least 160 amino acids, at least 180 amino acids, at least 200 amino acids, at least 220 amino acids, at least 240 amino acids, at least 260 amino acids, at least 300 amino acids, or at least 350 amino acids may be truncated at the C-terminus of the Cas13 effector. For example, at least 220 amino acids may be truncated at the N-terminus of the Cas13 effector, and at least 20 amino acids, at least 40 amino acids, at least 60 amino acids, at least 80 amino acids, at least 100 amino acids, at least 120 amino acids, at least 140 amino acids, at least 160 amino acids, at least 180 amino acids, at least 200 amino acids, at least 220 amino acids, at least 240 amino acids, at least 260 amino acids, at least 300 amino acids, or at least 350 amino acids may be truncated at the C-terminus of the Cas13 effector. For example, at least 240 amino acids may be truncated at the N-terminus of the Cas13 effector, and at least 20 amino acids, at least 40 amino acids, at least 60 amino acids, at least 80 amino acids, at least 100 amino acids, at least 120 amino acids, at least 140 amino acids, at least 160 amino acids, at least 180 amino acids, at least 200 amino acids, at least 220 amino acids, at least 240 amino acids, at least 260 amino acids, at least 300 amino acids, or at least 350 amino acids may be truncated at the C-terminus of the Cas13 effector. For example, at least 260 amino acids may be truncated at the N-terminus of the Cas13 effector, and at least 20 amino acids, at least 40 amino acids, at least 60 amino acids, at least 80 amino acids, at least 100 amino acids, at least 120 amino acids, at least 140 amino acids, at least 160 amino acids, at least 180 amino acids, at least 200 amino acids, at least 220 amino acids, at least 240 amino acids, at least 260 amino acids, at least 300 amino acids, or at least 350 amino acids may be truncated at the C-terminus of the Cas13 effector. For example, at least 280 amino acids may be truncated at the N-terminus of the Cas13 effector, and at least 20 amino acids, at least 40 amino acids, at least 60 amino acids, at least 80 amino acids, at least 100 amino acids, at least 120 amino acids, at least 140 amino acids, at least 160 amino acids, at least 180 amino acids, at least 200 amino acids, at least 220 amino acids, at least 240 amino acids, at least 260 amino acids, at least 300 amino acids, or at least 350 amino acids may be truncated at the C-terminus of the Cas13 effector. For example, at least 300 amino acids may be truncated at the N-terminus of the Cas13 effector, and at least 20 amino acids, at least 40 amino acids, at least 60 amino acids, at least 80 amino acids, at least 100 amino acids, at least 120 amino acids, at least 140 amino acids, at least 160 amino acids, at least 180 amino acids, at least 200 amino acids, at least 220 amino acids, at least 240 amino acids, at least 260 amino acids, at least 300 amino acids, or at least 350 amino acids may be truncated at the C-terminus of the Cas13 effector. For example, at least 350 amino acids may be truncated at the N-terminus of the Cas13 effector, and at least 20 amino acids, at least 40 amino acids, at least 60 amino acids, at least 80 amino acids, at least 100 amino acids, at least 120 amino acids, at least 140 amino acids, at least 160 amino acids, at least 180 amino acids, at least 200 amino acids, at least 220 amino acids, at least 240 amino acids, at least 260 amino acids, at least 300 amino acids, or at least 350 amino acids may be truncated at the C-terminus of the Cas13 effector.

### Split Proteins

[0610] It is noted that in this context, and more generally for the various applications as described herein, the use of a split version of the RNA targeting effector protein can be envisaged. Indeed, this may not only allow increased specificity but may also be advantageous for delivery. The Cas13 is split in the sense that the two parts of the Cas13 enzyme substantially comprise a functioning Cas13. Ideally, the split should always be so that the catalytic domain(s) are unaffected. That Cas13 may function as a nuclease or it may be a dead-Cas13 which is essentially an RNA-binding protein with very little or no catalytic activity, due to typically mutation(s) in its catalytic domains.

[0611] Each half of the split Cas13 may be fused to a dimerization partner. By means of example, and without limitation, employing rapamycin sensitive dimerization domains, allows to generate a chemically inducible split Cas13 for temporal control of Cas13 activity. Cas13 can thus be rendered chemically inducible by being split into two fragments and that rapamycin-sensitive dimerization domains may be used for controlled reassembly of the Cas13. The two parts of the split Cas13 can be thought of as the N′ terminal part and the C′ terminal part of the split Cas13. The fusion is typically at the split point of the Cas13. In other words, the C′ terminal of the N′ terminal part of the split Cas13 is fused to one of the dimer halves, whilst the N′ terminal of the C′ terminal part is fused to the other dimer half.

[0612] The Cas13 does not have to be split in the sense that the break is newly created. The split point is typically designed in silico and cloned into the constructs. Together, the two parts of the split Cas13, the N′ terminal and C′ terminal parts, form a full Cas13, comprising preferably at least 70% or more of the wildtype amino acids (or nucleotides encoding them), preferably at least 80% or more, preferably at least 90% or more, preferably at least 95% or more, and most preferably at least 99% or more of the wildtype amino acids (or nucleotides encoding them). Some trimming may be possible, and mutants are envisaged. Non-functional domains may be removed entirely. What is important is that the two parts may be brought together and that the desired Cas13 function is restored or reconstituted. The dimer may be a homodimer or a heterodimer.

[0613] In certain embodiments, the Cas13 effector as described herein may be used for mutation-specific, or allele-specific targeting, such as. for mutation-specific, or allele-specific knockdown.

[0614] The RNA targeting effector protein can moreover be fused to another functional RNase domain, such as a non-specific RNase or Argonaute 2, which acts in synergy to increase the RNase activity or to ensure further degradation of the message.

### Modulating Cas13 Effector Proteins

[0615] The invention provides accessory proteins that modulate CRISPR protein function. In certain embodiments, the accessory protein modulates catalytic activity of a CRISPR protein. In an embodiment of the invention an accessory protein modulates targeted, or sequence specific, nuclease activity. In an embodiment of the invention, an accessory protein modulates collateral nuclease activity. In an embodiment of the invention, an accessory protein modulates binding to a target nucleic acid.

[0616] According to the invention, the nuclease activity to be modulated can be directed against nucleic acids comprising or consisting of RNA, including without limitation mRNA, miRNA, siRNA and nucleic acids comprising cleavable RNA linkages along with nucleotide analogs. In an embodiment of the invention, the nuclease activity to be modulated can be directed against nucleic acids comprising or consisting of DNA, including without limitation nucleic acids comprising cleavable DNA linkages and nucleic acid analogs.

[0617] In an embodiment of the invention, an accessory protein enhances an activity of a CRISPR protein. In certain such embodiments, the accessory protein comprises a HEPN domain and enhances RNA cleavage. In certain embodiments, the accessory protein inhibits an activity of a CRISPR protein. In certain such embodiments, the accessory protein comprises an inactivated HEPN domain or lacks an HEPN domain altogether.

[0618] According to the invention, naturally occurring accessory proteins of Type VI CRISPR systems comprise small proteins encoded at or near a CRISPR locus that function to modify an activity of a CRISPR protein. In general, a CRISPR locus can be identified as comprising a putative CRISPR array and/or encoding a putative CRISPR effector protein. In an embodiment, an effector protein can be from 800 to 2000 amino acids, or from 900 to 1800 amino acids, or from 950 to 1300 amino acids. In an embodiment, an accessory protein can be encoded within 25 kb, or within 20 kb or within 15 kb, or within 10 kb of a putative CRISPR effector protein or array, or from 2 kb to 10 kb from a putative CRISPR effector protein or array.

[0619] In an embodiment of the invention, an accessory protein is from 50 to 300 amino acids, or from 100 to 300 amino acids or from 150 to 250 amino acids or about 200 amino acids. Non-limiting examples of accessory proteins include the csx27 and csx28 proteins identified herein.

[0620] Identification and use of a CRISPR accessory protein of the invention is independent of CRISPR effector protein classification. Accessory proteins of the invention can be found in association with or engineered to function with a variety of CRISPR effector proteins. Examples of accessory proteins identified and used herein are representative of CRISPR effector proteins generally. It is understood that CRISPR effector protein classification may involve homology, feature location (e.g., location of REC domains, NUC domains, HEPN sequences), nucleic acid target (e.g. DNA or RNA), absence or presence of tracr RNA, location of guide/spacer sequence 5′ or 3′ of a direct repeat, or other criteria. In embodiments of the invention, accessory protein identification and use transcend such classifications.

[0621] In type VI CRISPR-Cas systems that target RNA, the Cas proteins usually comprise two conserved HEPN domains which are involved in RNA cleavage. In certain embodiments, the Cas protein processes crRNA to generate mature crRNA. The guide sequence of the crRNA recognizes target RNA with a complementary sequence and the Cas protein degrades the target strand. More particularly, in certain embodiments, upon target binding, the Cas protein undergoes a structural rearrangement that brings two HEPN domains together to form an active HEPN catalytic site and the target RNA is then cleaved. The location of the catalytic site near the surface of the Cas protein allows non-specific collateral ssRNA cleavage.

[0622] In certain embodiments, accessory proteins are instrumental in increasing or reducing target and/or collateral RNA cleavage. Without being bound by theory, an accessory protein that activates CRISPR activity (e.g., a csx28 protein or ortholog or variant comprising a HEPN domain) can be envisioned as capable of interacting with a Cas protein and combining its HEPN domain with a HEPN domain of the Cas protein to form an active HEPN catalytic site, whereas an inhibitory accessory protein (e.g. csx27 with lacks an HEPN domain) can be envisioned as capable of interacting with a Cas protein and reducing or blocking a conformation of the Cas protein that would bring together two HEPN domains.

[0623] According to the invention, in certain embodiments, enhancing activity of a Type VI Cas protein or complex thereof comprises contacting the Type VI Cas protein or complex thereof with an accessory protein from the same organism that activates the Cas protein. In other embodiments, enhancing activity of a Type VI Cas protein of complex thereof comprises contacting the Type VI Cas protein or complex thereof with an activator accessory protein from a different organism within the same subclass (e.g., Type VI-b). In other embodiments, enhancing activity of a Type VI Cas protein or complex thereof comprises contacting the Type VI Cas protein or complex thereof with an accessory protein not within the subclass (e.g., a Type VI Cas protein other than Type VI-b with a Type VI-b accessory protein or vice-versa).

[0624] According to the invention, in certain embodiments, repressing activity of a Type VI Cas protein or complex thereof comprises contacting the Type VI Cas protein or complex thereof with an accessory protein from the same organism that represses the Cas protein. In other embodiments, repressing activity of a Type VI Cas protein or complex thereof comprises contacting the Type VI Cas protein or complex thereof with a repressor accessory protein from a different organism within the same subclass (e.g., Type VI-b). In other embodiments, repressing activity of a Type VI Cas protein or complex thereof comprises contacting the Type VI Cas protein or complex thereof with a repressor accessory protein not within the subclass (e.g., a Type VI Cas protein other than Type VI-b with a Type VI-b repressor accessory protein or vice-versa).

[0625] In certain embodiments where the Type VI Cas protein and the Type VI accessory protein are from the same organism, the two proteins will function together in an engineered CRISPR system. In certain embodiments, it will be desirable to alter the function of the engineered CRISPR system, for example by modifying either or both of the proteins or their expression. In embodiments where the Type VI Cas protein and the Type VI accessory protein are from different organisms which may be within the same class or different classes, the proteins may function together in an engineered CRISPR system but it will often be desired or necessary to modify either or both of the proteins to function together.

[0626] Accordingly, in certain embodiments of the invention either or both of a Cas protein and an accessory protein may be modified to adjust aspects of protein-protein interactions between the Cas protein and accessory protein. In certain embodiments, either or both of a Cas protein and an accessory protein may be modified to adjust aspects of protein-nucleic acid interactions. Ways to adjust protein-protein interactions and protein-nucleic acid interaction include without limitation, fitting molecular surfaces, polar interactions, hydrogen bonds, and modulating van der Waals interactions. In certain embodiments, adjusting protein-protein interactions or protein-nucleic acid binding comprises increasing or decreasing binding interactions. In certain embodiments, adjusting protein-protein interactions or protein-nucleic acid binding comprises modifications that favor or disfavor a conformation of the protein or nucleic acid.

[0627] By “fitting”, is meant determining including by automatic, or semi-automatic means, interactions between one or more atoms of a Cas13 protein (and optionally at least one atoms of a Cas13 accessory protein), or between one or more atoms of a Cas13 protein and one or more atoms of a nucleic acid, (or optionally between one or more atoms of a Cas13 accessory protein and a nucleic acid), and calculating the extent to which such interactions are stable. Interactions include attraction and repulsion, brought about by charge, steric considerations and the like.

[0628] The three-dimensional structure of Type VI CRISPR protein or complex thereof (and/or a Type VI CRISPR accessory protein or complex thereof in the context of Cas13b) provides in the context of the instant invention an additional tool for identifying additional mutations in orthologs of Cas13. The crystal structure can also be basis for the design of new and specific Cas13s (and optionally Cas13 accessory proteins). Various computer-based methods for fitting are described further. Binding interactions of Cas13s (and optionally accessory proteins), and nucleic acids can be examined through the use of computer modeling using a docking program. Docking programs are known; for example GRAM, DOCK or AUTODOCK (see Walters et al. Drug Discovery Today, vol. 3, no. 4 (1998), 160-178, and Dunbrack et al. Folding and Design 2 (1997), 27-42). This procedure can include computer fitting to ascertain how well the shape and the chemical structure of the binding partners. Computer-assisted, manual examination of the active site or binding site of a Type VI system may be performed. Programs such as GRID (P. Goodford, J. Med. Chem, 1985, 28, 849-57)—a program that determines probable interaction sites between molecules with various functional groups—may also be used to analyze the active site or binding site to predict partial structures of binding compounds. Computer programs can be employed to estimate the attraction, repulsion or steric hindrance of the two binding partners, e.g., components of a Type VI CRISPR system, or a nucleic acid molecule and a component of a Type VI CRISPR system.

[0629] Amino acid substitutions may be made on the basis of differences or similarities in amino acid properties (such as polarity, charge, solubility, hydrophobicity, hydrophilicity, and/or the amphipathic nature of the residues) and it is therefore useful to group amino acids together in functional groups. Amino acids may be grouped together based on the properties of their side chains alone. In comparing orthologs, there are likely to be residues conserved for structural or catalytic reasons. These sets may be described in the form of a Venn diagram (Livingstone C. D. and Barton G. J. (1993) “Protein sequence alignments: a strategy for the hierarchical analysis of residue conservation” Comput. Appl. Biosci. 9: 745-756) (Taylor W.R. (1986) “The classification of amino acid conservation” J. Theor. Biol. 119; 205-218). Conservative substitutions may be made, for example according to the table below which describes a generally accepted Venn diagram grouping of amino acids (see Table 7 below).

TABLE 7

| Set | | Sub-set | |
|---|---|---|---|
| Hydrophobic | F W Y H K M I L V A G C | Aromatic | F W Y H |
| | (SEQ ID NO: 240) | Aliphatic | I L V |
| Polar | W Y H K R E D C S T N Q | Charged | H K R E D |
| | (SEQ ID NO: 241) | Positively charged | H K R |
| | | Negatively charged | E D |
| Small | V C A G S P T N D | Tiny | A G S |
| | (SEQ ID NO: 242) | | |

[0630] In an engineered Cas13 system, modification may comprise modification of one or more amino acid residues of the Cas13 protein (and/or may comprise modification of one or more amino acid residues of the Cas13 accessory protein in the case of Cas13b).

[0631] In an engineered Cas13 system, modification may comprise modification of one or more amino acid residues located in a region which comprises residues which are positively charged in the unmodified Cas13 protein (and/or Cas13 accessory protein).

[0632] In an engineered Cas13 system, modification may comprise modification of one or more amino acid residues which are positively charged in the unmodified Cas13 protein (and/or Cas13 accessory protein).

[0633] In an engineered Cas13 system, modification may comprise modification of one or more amino acid residues which are not positively charged in the unmodified Cas13 protein (and/or Cas13 accessory protein).

[0634] The modification may comprise modification of one or more amino acid residues which are uncharged in the unmodified Cas13 protein (and/or Cas13 accessory protein).

[0635] The modification may comprise modification of one or more amino acid residues which are negatively charged in the unmodified Cas13 protein (and/or Cas13 accessory protein).

[0636] The modification may comprise modification of one or more amino acid residues which are hydrophobic in the unmodified Cas13 protein (and/or Cas13 accessory protein).

[0637] The modification may comprise modification of one or more amino acid residues which are polar in the unmodified Cas13 protein (and/or Cas13 accessory protein).

[0638] The modification may comprise substitution of a hydrophobic amino acid or polar amino acid with a charged amino acid, which can be a negatively charged or positively charged amino acid. The modification may comprise substitution of a negatively charged amino acid with a positively charged or polar or hydrophobic amino acid. The modification may comprise substitution of a positively charged amino acid with a negatively charged or polar or hydrophobic amino acid.

[0639] Embodiments of the invention include sequences (both polynucleotide or polypeptide) which may comprise homologous substitution (substitution and replacement are both used herein to mean the interchange of an existing amino acid residue or nucleotide, with an alternative residue or nucleotide) that may occur i.e., like-for-like substitution in the case of amino acids such as basic for basic, acidic for acidic, polar for polar, etc. Non-homologous substitution may also occur i.e., from one class of residue to another or alternatively involving the inclusion of unnatural amino acids such as ornithine (hereinafter referred to as Z), diaminobutyric acid ornithine (hereinafter referred to as B), norleucine ornithine (hereinafter referred to as O), pyridylalanine, thienylalanine, naphthylalanine and phenylglycine. Variant amino acid sequences may include suitable spacer groups that may be inserted between any two amino acid residues of the sequence including alkyl groups such as methyl, ethyl or propyl groups in addition to amino acid spacers such as glycine or β-alanine residues. A further form of variation, which involves the presence of one or more amino acid residues in peptoid form, may be well understood by those skilled in the art. For the avoidance of doubt, “the peptoid form” is used to refer to variant amino acid residues wherein the α-carbon substituent group is on the residue's nitrogen atom rather than the α-carbon. Processes for preparing peptides in the peptoid form are known in the art, for example Simon R J et al., PNAS (1992) 89(20), 9367-9371 and Horwell D C, Trends Biotechnol. (1995) 13(4), 132-134.

[0640] Homology modelling: Corresponding residues in other Cas13 orthologs can be identified by the methods of Zhang et al., 2012 (Nature; 490(7421): 556-60) and Chen et al., 2015 (PLoS Comput Biol; 11(5): e1004248)—a computational protein-protein interaction (PPI) method to predict interactions mediated by domain-motif interfaces. PrePPI (Predicting PPI), a structure based PPI prediction method, combines structural evidence with non-structural evidence using a Bayesian statistical framework. The method involves taking a pair a query proteins and using structural alignment to identify structural representatives that correspond to either their experimentally determined structures or homology models. Structural alignment is further used to identify both close and remote structural neighbors by considering global and local geometric relationships. Whenever two neighbors of the structural representatives form a complex reported in the Protein Data Bank, this defines a template for modelling the interaction between the two query proteins. Models of a complex are created by superimposing the representative structures on their corresponding structural neighbor in the template. This approach is in Dey et al., 2013 (Prot Sci; 22: 359-66).

### Collateral Activity

[0641] Collateral activity was recently leveraged for a highly sensitive and specific nucleic acid detection platform termed SHERLOCK that is useful for many clinical diagnoses (Gootenberg, J. S. et al. Nucleic acid detection with CRISPR-Cas13a/C2c2. Science 356, 438-442 (2017)).

[0642] According to the invention, engineered CRISPR-Cas systems are optimized for RNA endonuclease activity and can be expressed in mammalian cells and targeted to effectively knock down reporter molecules or transcripts in cells.

[0643] The collateral effect of engineered CRISPR-Cas with isothermal amplification provides a CRISPR-based diagnostic providing rapid DNA or RNA detection with high sensitivity and single-base mismatch specificity. The CRISPR-Cas-based molecular detection platform is used to detect specific strains of virus, distinguish pathogenic bacteria, genotype human DNA, and identify cell-free tumor DNA mutations. Furthermore, reaction reagents can be lyophilized for cold-chain independence and long-term storage, and readily reconstituted on paper for field applications.

[0644] The ability to rapidly detect nucleic acids with high sensitivity and single-base specificity on a portable platform may aid in disease diagnosis and monitoring, epidemiology, and general laboratory tasks. Although methods exist for detecting nucleic acids, they have trade-offs among sensitivity, specificity, simplicity, cost, and speed.

[0645] Microbial Clustered Regularly Interspaced Short Palindromic Repeats (CRISPR) and CRISPR-associated (CRISPR-Cas) adaptive immune systems contain programmable endonucleases that can be leveraged for CRISPR-based diagnostics (CRISPR-Dx). CRISPR-Cas can be reprogrammed with CRISPR RNAs (crRNAs) to provide a platform for specific DNA sensing. Upon recognition of its DNA target, activated CRISPR-Cas engages in “collateral” cleavage of nearby non-targeted nucleic acids (i.e., RNA and/or ssDNA). This crRNA-programmed collateral cleavage activity allows CRISPR-Cas to detect the presence of a specific DNA in vivo by triggering programmed cell death or by nonspecific degradation of labelled RNA or ssDNA. Here is described an in vitro nucleic acid detection platform with high sensitivity based on nucleic acid amplification and CRISPR-Cas-mediated collateral cleavage of a commercial reporter RNA, allowing for real-time detection of the target.

[0646] Conservation of non-specific ss DNA and RNA directed proteins will inevitably lead to further and, potentially, improved CRISPR proteins that demonstrate collateral cleavage and may be used for detection and offer greater breadth for multiplexed detection of nucleic acid targets in amplified and highly sensitive, especially SHERLOCK, diagnostic systems

### RNA-Based Masking

[0647] In certain example embodiments, an RNA-based masking construct suppresses generation of a detectable positive signal, or the RNA-based masking construct suppresses generation of a detectable positive signal by masking the detectable positive signal, or generating a detectable negative signal instead, or the RNA-based masking construct comprises a silencing RNA that suppresses generation of a gene product encoded by a reporting construct, wherein the gene product generates the detectable positive signal when expressed.

[0648] In another example embodiment, the RNA-based masking construct is a ribozyme that generates a negative detectable signal, and wherein the positive detectable signal is generated when the ribozyme is deactivated. In one example embodiment, the ribozyme converts a substrate to a first color and wherein the substrate converts to a second color when the ribozyme is deactivated. In another example embodiment, the RNA-based masking agent is an aptamer that sequesters an enzyme, wherein the enzyme generates a detectable signal upon release from the aptamer by acting upon a substrate, or the aptamer sequesters a pair of agents that when released from the aptamers combine to generate a detectable signal.

[0649] In another example embodiment, the RNA-based masking construct comprises an RNA oligonucleotide to which are attached a detectable ligand oligonucleotide and a masking component. In certain example embodiments, the detectable ligand is a fluorophore and the masking component is a quencher molecule.

[0650] In another aspect, the invention provides a method for detecting target nucleic acid (e.g.,) RNAs in samples, comprising: distributing a sample or set of samples into one or more individual discrete volumes, the individual discrete volumes comprising a CRISPR system comprising an effector protein, one or more guide RNAs, an RNA-based masking construct; incubating the sample or set of samples under conditions sufficient to allow binding of the one or more guide RNAs to one or more target molecules; activating the CRISPR effector protein via binding of the one or more guide RNAs to the one or more target molecules, wherein activating the CRISPR effector protein results in modification of the RNA-based masking construct such that a detectable positive signal is produced; and detecting the detectable positive signal, wherein detection of the detectable positive signal indicates a presence of one or more target molecules in the sample.

[0651] In some embodiments, the method for detecting a target nucleic acid in a sample comprising: contacting a sample with: an engineered CRISPR-Cas protein; at least one guide polynucleotide comprising a guide sequence capable of binding to the target nucleic acid and designed to form a complex with the engineered CRISPR-Cas; and a RNA-based masking construct comprising a non-target sequence; wherein the engineered CRISPR-Cas protein exhibits collateral RNase activity and cleaves the non-target sequence of the detection construct; and detecting a signal from cleavage of the non-target sequence, thereby detecting the target nucleic acid in the sample. In some embodiments, the method further comprises contacting the sample with reagents for amplifying the target nucleic acid. In some embodiments, the reagents for amplifying comprises isothermal amplification reaction reagents. In some embodiments, the isothermal amplification reagents comprise nucleic-acid sequence-based amplification, recombinase polymerase amplification, loop-mediated isothermal amplification, strand displacement amplification, helicase-dependent amplification, or nicking enzyme amplification reagents.

[0652] In some embodiments, the target nucleic acid is DNA molecule and the method further comprises contacting the target DNA molecule with a primer comprising an RNA polymerase site and RNA polymerase.

[0653] In some embodiments, the masking construct: suppresses generation of a detectable positive signal until the masking construct cleaved or deactivated, or masks a detectable positive signal or generates a detectable negative signal until the masking construct cleaved or deactivated.

[0654] In some embodiments, the masking construct comprises: a. a silencing RNA that suppresses generation of a gene product encoded by a reporting construct, wherein the gene product generates the detectable positive signal when expressed; b. a ribozyme that generates the negative detectable signal, and wherein the positive detectable signal is generated when the ribozyme is deactivated; or c. a ribozyme that converts a substrate to a first color and wherein the substrate converts to a second color when the ribozyme is deactivated; d. an aptamer and/or comprises a polynucleotide-tethered inhibitor; e. a polynucleotide to which a detectable ligand and a masking component are attached; f. a nanoparticle held in aggregate by bridge molecules, wherein at least a portion of the bridge molecules comprises a polynucleotide, and wherein the solution undergoes a color shift when the nanoparticle is disbursed in solution; g. a quantum dot or fluorophore linked to one or more quencher molecules by a linking molecule, wherein at least a portion of the linking molecule comprises a polynucleotide; h. a polynucleotide in complex with an intercalating agent, wherein the intercalating agent changes absorbance upon cleavage of the polynucleotide; or l. two fluorophores tethered by a polynucleotide that undergo a shift in fluorescence when released from the polynucleotide. In some embodiments, the aptamer a. comprises a polynucleotide-tethered inhibitor that sequesters an enzyme, wherein the enzyme generates a detectable signal upon release from the aptamer or polynucleotide-tethered inhibitor by acting upon a substrate; or b. is an inhibitory aptamer that inhibits an enzyme and prevents the enzyme from catalyzing generation of a detectable signal from a substrate or wherein the polynucleotide-tethered inhibitor inhibits an enzyme and prevents the enzyme from catalyzing generation of a detectable signal from a substrate; or c. sequesters a pair of agents that when released from the aptamers combine to generate a detectable signal. In some embodiments, the nanoparticle is a colloidal metal. In some embodiments, the at least one guide polynucleotide comprises a mismatch. In some embodiments, the mismatch is up- or downstream of a single nucleotide variation on the one or more guide sequences.

[0655] In another aspect, the invention provides a method for detecting peptides in samples, comprising: distributing a sample or set of samples into a set of individual discrete volumes, the individual discrete volumes comprising peptide detection aptamers, a CRISPR system comprising an effector protein, one or more guide RNAs, an RNA-based masking construct, wherein the peptide detection aptamers comprising a masked RNA polymerase site and configured to bind one or more target molecules; incubating the sample or set of samples under conditions sufficient to allow binding of the peptide detection aptamers to the one or more target molecules, wherein binding of the aptamer to a corresponding target molecule exposes the RNA polymerase binding site resulting in RNA synthesis of a trigger RNA; activating the CRISPR effector protein via binding of the one or more guide RNAs to the trigger RNA, wherein activating the CRISPR effector protein results in modification of the RNA-based masking construct such that a detectable positive signal is produced; and detecting the detectable positive signal, wherein detection of the detectable positive signal indicates a presence of one or more target molecules in a sample.

[0656] In certain example embodiments, the one or more guide RNAs are designed to bind to one or more target molecules that are diagnostic for a disease state. In certain other example embodiments, the disease state is an infection, an organ disease, a blood disease, an immune system disease, a cancer, a brain and nervous system disease, an endocrine disease, a pregnancy or childbirth-related disease, an inherited disease, or an environmentally-acquired disease, cancer, or a fungal infection, a bacterial infection, a parasite infection, or a viral infection.

[0657] In certain example embodiments, the RNA-based masking construct suppresses generation of a detectable positive signal, or the RNA-based masking construct suppresses generation of a detectable positive signal by masking the detectable positive signal, or generating a detectable negative signal instead, or the RNA-based masking construct comprises a silencing RNA that suppresses generation of a gene product encoded by a reporting construct, wherein the gene product generates the detectable positive signal when expressed, or the RNA-based masking construct is a ribozyme that generates the negative detectable signal, and wherein the positive detectable signal is generated when the ribozyme is inactivated. In other example embodiments, the ribozyme converts a substrate to a first state and wherein the substrate converts to a second state when the ribozyme is inactivated, or the RNA-based masking agent is an aptamer, or the aptamer sequesters an enzyme, wherein the enzyme generates a detectable signal upon release from the aptamer by acting upon a substrate, or the aptamer sequesters a pair of agents that when released from the aptamers combine to generate a detectable signal. In still further embodiments, the RNA-based masking construct comprises an RNA oligonucleotide with a detectable ligand on a first end of the RNA oligonucleotide and a masking component on a second end of the RNA oligonucleotide, or the detectable ligand is a fluorophore and the masking component is a quencher molecule.

### Base Editing

[0658] The present disclosure also provides for a base editing system. In general, such a system may comprise a deaminase (e.g., an adenosine deaminase or cytidine deaminase) fused with a Cas protein. The Cas protein may be a dead Cas protein or a Cas nickase protein. In certain examples, the system comprises a mutated form of an adenosine deaminase fused with a dead CRISPR-Cas or CRISPR-Cas nickase. The mutated form of the adenosine deaminase may have both adenosine deaminase and cytidine deaminase activities.

[0659] In certain example embodiments, a dCas13b can be fused with an adenosine deaminase or cytidine deaminase for base editing purposes. In some cases, the dCas13b is dCas13b-t1, dCas13b-t2, or dCas13b-t3.

[0660] In one aspect, the present disclosure provides an engineered adenosine deaminase. The engineered adenosine deaminase may comprise one or more mutations herein. In some embodiments, the engineered adenosine deaminase has cytidine deaminase activity. In certain examples, the engineered adenosine deaminase has both cytidine deaminase activity and adenosine deaminase. FIG. 101 shows an example system and method of programmable cytidine to uridine conversion according to some embodiments herein. In some cases, the modifications by base editors herein may be used for targeting post-translational signaling or catalysis. FIG. 102 shows examples approaches.

### Adenosine Deaminase

[0661] The term “adenosine deaminase” or “adenosine deaminase protein” as used herein refers to a protein, a polypeptide, or one or more functional domain(s) of a protein or a polypeptide that is capable of catalyzing a hydrolytic deamination reaction that converts an adenine (or an adenine moiety of a molecule) to a hypoxanthine (or a hypoxanthine moiety of a molecule), as shown below. In some embodiments, the adenine-containing molecule is an adenosine (A), and the hypoxanthine-containing molecule is an inosine (I). The adenine-containing molecule can be deoxyribonucleic acid (DNA) or ribonucleic acid (RNA).

[chemical structure]

[0662] According to the present disclosure, adenosine deaminases that can be used in connection with the present disclosure include, but are not limited to, members of the enzyme family known as adenosine deaminases that act on RNA (ADARs), members of the enzyme family known as adenosine deaminases that act on tRNA (ADATs), and other adenosine deaminase domain-containing (ADAD) family members. According to the present disclosure, the adenosine deaminase is capable of targeting adenine in a RNA/DNA and RNA duplexes. Indeed, Zheng et al. (Nucleic Acids Res. 2017, 45(6): 3369-3377) demonstrate that ADARs can carry out adenosine to inosine editing reactions on RNA/DNA and RNA/RNA duplexes. In particular embodiments, the adenosine deaminase has been modified to increase its ability to edit DNA in a RNA/DNA heteroduplex of in an RNA duplex as detailed herein below.

[0663] In some embodiments, the adenosine deaminase is derived from one or more metazoa species, including but not limited to, mammals, birds, frogs, squids, fish, flies and worms. In some embodiments, the adenosine deaminase is a human, squid or Drosophila adenosine deaminase.

[0664] In some embodiments, the adenosine deaminase is a human ADAR, including hADAR1, hADAR2, hADAR3. In some embodiments, the adenosine deaminase is a Caenorhabditis elegans ADAR protein, including ADR-1 and ADR-2. In some embodiments, the adenosine deaminase is a Drosophila ADAR protein, including dAdar. In some embodiments, the adenosine deaminase is a squid Loligo pealeii ADAR protein, including sqADAR2a and sqADAR2b. In some embodiments, the adenosine deaminase is a human ADAT protein. In some embodiments, the adenosine deaminase is a Drosophila ADAT protein. In some embodiments, the adenosine deaminase is a human ADAD protein, including TENR (hADAD1) and TENRL (hADAD2).

[0665] In some embodiments, the adenosine deaminase is a TadA protein such as E. coli TadA. See Kim et al., Biochemistry 45:6407-6416 (2006); Wolf et al., EMBO J. 21:3841-3851 (2002). In some embodiments, the adenosine deaminase is mouse ADA. See Grunebaum et al., Curr. Opin. Allergy Clin. Immunol. 13:630-638 (2013). In some embodiments, the adenosine deaminase is human ADAT2. See Fukui et al., J. Nucleic Acids 2010:260512 (2010). In some embodiments, the deaminase (e.g., adenosine or cytidine deaminase) is one or more of those described in Cox et al., Science. 2017 Nov. 24; 358(6366): 1019-1027; Komore et al., Nature. 2016 May 19; 533(7603):420-4; and Gaudelli et al., Nature. 2017 Nov. 23; 551(7681):464-471.

[0666] In some embodiments, the adenosine deaminase protein recognizes and converts one or more target adenosine residue(s) in a double-stranded nucleic acid substrate into inosine residues (s). In some embodiments, the double-stranded nucleic acid substrate is a RNA-DNA hybrid duplex. In some embodiments, the adenosine deaminase protein recognizes a binding window on the double-stranded substrate. In some embodiments, the binding window contains at least one target adenosine residue(s). In some embodiments, the binding window is in the range of about 3 bp to about 100 bp. In some embodiments, the binding window is in the range of about 5 bp to about 50 bp. In some embodiments, the binding window is in the range of about 10 bp to about 30 bp. In some embodiments, the binding window is about 1 bp, 2 bp, 3 bp, 5 bp, 7 bp, 10 bp, 15 bp, 20 bp, 25 bp, 30 bp, 40 bp, 45 bp, 50 bp, 55 bp, 60 bp, 65 bp, 70 bp, 75 bp, 80 bp, 85 bp, 90 bp, 95 bp, or 100 bp.

[0667] In some embodiments, the adenosine deaminase protein comprises one or more deaminase domains. Not intended to be bound by a particular theory, it is contemplated that the deaminase domain functions to recognize and convert one or more target adenosine (A) residue(s) contained in a double-stranded nucleic acid substrate into inosine (I) residue(s). In some embodiments, the deaminase domain comprises an active center. In some embodiments, the active center comprises a zinc ion. In some embodiments, during the A-to-I editing process, base pairing at the target adenosine residue is disrupted, and the target adenosine residue is “flipped” out of the double helix to become accessible by the adenosine deaminase. In some embodiments, amino acid residues in or near the active center interact with one or more nucleotide(s) 5′ to a target adenosine residue. In some embodiments, amino acid residues in or near the active center interact with one or more nucleotide(s) 3′ to a target adenosine residue. In some embodiments, amino acid residues in or near the active center further interact with the nucleotide complementary to the target adenosine residue on the opposite strand. In some embodiments, the amino acid residues form hydrogen bonds with the 2′ hydroxyl group of the nucleotides.

[0668] In some embodiments, the adenosine deaminase comprises human ADAR2 full protein (hADAR2) or the deaminase domain thereof (hADAR2-D). In some embodiments, the adenosine deaminase is an ADAR family member that is homologous to hADAR2 or hADAR2-D.

[0669] Particularly, in some embodiments, the homologous ADAR protein is human ADAR1 (hADAR1) or the deaminase domain thereof (hADAR1-D). In some embodiments, glycine 1007 of hADAR1-D corresponds to glycine 487 hADAR2-D, and glutamic Acid 1008 of hADAR1-D corresponds to glutamic acid 488 of hADAR2-D.

[0670] In some embodiments, the adenosine deaminase comprises the wild-type amino acid sequence of hADAR2-D. In some embodiments, the adenosine deaminase comprises one or more mutations in the hADAR2-D sequence, such that the editing efficiency, and/or substrate editing preference of hADAR2-D is changed according to specific needs. The engineered adenosine deaminase may be fused with a Cas protein, e.g., Cas9, Cas 12 (e.g., Cas12a, Cas12b, Cas12c, Cas12d, etc.), Cas13 (e.g., Cas13a, Cas13b (such as Cas13b-t1, Cas13b-t2, Cas13b-t3), Cas13c, Cas13d, etc.), Cas14, CasX, CasY, or an engineered form of the Cas protein (e.g., an invective, dead form, a nickase form). In some examples, provided herein include an engineered adenosine deaminase fused with a dead Cas13b protein or Cas13 nickase.

[0671] Certain mutations of hADAR1 and hADAR2 proteins have been described in Kuttan et al., Proc Natl Acad Sci USA. (2012) 109(48):E3295-304; Want et al. ACS Chem Biol. (2015) 10(11):2512-9; and Zheng et al. Nucleic Acids Res. (2017) 45(6):3369-337, each of which is incorporated herein by reference in its entirety.

[0672] In some embodiments, the adenosine deaminase comprises a mutation at glycine336 of the hADAR2-D amino acid sequence, or a corresponding position in a homologous ADAR protein. In some embodiments, the glycine residue at position 336 is replaced by an aspartic acid residue (G336D).

[0673] In some embodiments, the adenosine deaminase comprises a mutation at Glycine487 of the hADAR2-D amino acid sequence, or a corresponding position in a homologous ADAR protein. In some embodiments, the glycine residue at position 487 is replaced by a non-polar amino acid residue with relatively small side chains. For example, in some embodiments, the glycine residue at position 487 is replaced by an alanine residue (G487A). In some embodiments, the glycine residue at position 487 is replaced by a valine residue (G487V). In some embodiments, the glycine residue at position 487 is replaced by an amino acid residue with relatively large side chains. In some embodiments, the glycine residue at position 487 is replaced by a arginine residue (G487R). In some embodiments, the glycine residue at position 487 is replaced by a lysine residue (G487K). In some embodiments, the glycine residue at position 487 is replaced by a tryptophan residue (G487W). In some embodiments, the glycine residue at position 487 is replaced by a tyrosine residue (G487Y).

[0674] In some embodiments, the adenosine deaminase comprises a mutation at glutamic acid488 of the hADAR2-D amino acid sequence, or a corresponding position in a homologous ADAR protein. In some embodiments, the glutamic acid residue at position 488 is replaced by a glutamine residue (E488Q). In some embodiments, the glutamic acid residue at position 488 is replaced by a histidine residue (E488H). In some embodiments, the glutamic acid residue at position 488 is replace by an arginine residue (E488R). In some embodiments, the glutamic acid residue at position 488 is replace by a lysine residue (E488K). In some embodiments, the glutamic acid residue at position 488 is replace by an asparagine residue (E488N). In some embodiments, the glutamic acid residue at position 488 is replace by an alanine residue (E488A). In some embodiments, the glutamic acid residue at position 488 is replace by a Methionine residue (E488M). In some embodiments, the glutamic acid residue at position 488 is replace by a serine residue (E488S). In some embodiments, the glutamic acid residue at position 488 is replace by a phenylalanine residue (E488F). In some embodiments, the glutamic acid residue at position 488 is replace by a lysine residue (E488L). In some embodiments, the glutamic acid residue at position 488 is replace by a tryptophan residue (E488W).

[0675] In some embodiments, the adenosine deaminase comprises a mutation at threonine490 of the hADAR2-D amino acid sequence, or a corresponding position in a homologous ADAR protein. In some embodiments, the threonine residue at position 490 is replaced by a cysteine residue (T490C). In some embodiments, the threonine residue at position 490 is replaced by a serine residue (T490S). In some embodiments, the threonine residue at position 490 is replaced by an alanine residue (T490A). In some embodiments, the threonine residue at position 490 is replaced by a phenylalanine residue (T490F). In some embodiments, the threonine residue at position 490 is replaced by a tyrosine residue (T490Y). In some embodiments, the threonine residue at position 490 is replaced by a serine residue (T490R). In some embodiments, the threonine residue at position 490 is replaced by an alanine residue (T490K). In some embodiments, the threonine residue at position 490 is replaced by a phenylalanine residue (T490P). In some embodiments, the threonine residue at position 490 is replaced by a tyrosine residue (T490E).

[0676] In some embodiments, the adenosine deaminase comprises a mutation at valine493 of the hADAR2-D amino acid sequence, or a corresponding position in a homologous ADAR protein. In some embodiments, the valine residue at position 493 is replaced by an alanine residue (V493A). In some embodiments, the valine residue at position 493 is replaced by a serine residue (V493S). In some embodiments, the valine residue at position 493 is replaced by a threonine residue (V493T). In some embodiments, the valine residue at position 493 is replaced by an arginine residue (V493R). In some embodiments, the valine residue at position 493 is replaced by an aspartic acid residue (V493D). In some embodiments, the valine residue at position 493 is replaced by a proline residue (V493P). In some embodiments, the valine residue at position 493 is replaced by a glycine residue (V493G).

[0677] In some embodiments, the adenosine deaminase comprises a mutation at alanine589 of the hADAR2-D amino acid sequence, or a corresponding position in a homologous ADAR protein. In some embodiments, the alanine residue at position 589 is replaced by a valine residue (A589V).

[0678] In some embodiments, the adenosine deaminase comprises a mutation at asparagine597 of the hADAR2-D amino acid sequence, or a corresponding position in a homologous ADAR protein. In some embodiments, the asparagine residue at position 597 is replaced by a lysine residue (N597K). In some embodiments, the adenosine deaminase comprises a mutation at position 597 of the amino acid sequence, which has an asparagine residue in the wild type sequence. In some embodiments, the asparagine residue at position 597 is replaced by an arginine residue (N597R). In some embodiments, the adenosine deaminase comprises a mutation at position 597 of the amino acid sequence, which has an asparagine residue in the wild type sequence. In some embodiments, the asparagine residue at position 597 is replaced by an alanine residue (N597A). In some embodiments, the adenosine deaminase comprises a mutation at position 597 of the amino acid sequence, which has an asparagine residue in the wild type sequence. In some embodiments, the asparagine residue at position 597 is replaced by a glutamic acid residue (N597E). In some embodiments, the adenosine deaminase comprises a mutation at position 597 of the amino acid sequence, which has an asparagine residue in the wild type sequence. In some embodiments, the asparagine residue at position 597 is replaced by a histidine residue (N597H). In some embodiments, the adenosine deaminase comprises a mutation at position 597 of the amino acid sequence, which has an asparagine residue in the wild type sequence. In some embodiments, the asparagine residue at position 597 is replaced by a glycine residue (N597G). In some embodiments, the adenosine deaminase comprises a mutation at position 597 of the amino acid sequence, which has an asparagine residue in the wild type sequence. In some embodiments, the asparagine residue at position 597 is replaced by a tyrosine residue (N597Y). In some embodiments, the asparagine residue at position 597 is replaced by a phenylalanine residue (N597F). In some embodiments, the adenosine deaminase comprises mutation N597I. In some embodiments, the adenosine deaminase comprises mutation N597L. In some embodiments, the adenosine deaminase comprises mutation N597V. In some embodiments, the adenosine deaminase comprises mutation N597M. In some embodiments, the adenosine deaminase comprises mutation N597C. In some embodiments, the adenosine deaminase comprises mutation N597P. In some embodiments, the adenosine deaminase comprises mutation N597T. In some embodiments, the adenosine deaminase comprises mutation N597S. In some embodiments, the adenosine deaminase comprises mutation N597W. In some embodiments, the adenosine deaminase comprises mutation N597Q. In some embodiments, the adenosine deaminase comprises mutation N597D. In certain example embodiments, the mutations at N597 described above are further made in the context of an E488Q background

[0679] In some embodiments, the adenosine deaminase comprises a mutation at serine599 of the hADAR2-D amino acid sequence, or a corresponding position in a homologous ADAR protein. In some embodiments, the serine residue at position 599 is replaced by a threonine residue (S599T).

[0680] In some embodiments, the adenosine deaminase comprises a mutation at asparagine613 of the hADAR2-D amino acid sequence, or a corresponding position in a homologous ADAR protein. In some embodiments, the asparagine residue at position 613 is replaced by a lysine residue (N613K). In some embodiments, the adenosine deaminase comprises a mutation at position 613 of the amino acid sequence, which has an asparagine residue in the wild type sequence. In some embodiments, the asparagine residue at position 613 is replaced by an arginine residue (N613R). In some embodiments, the adenosine deaminase comprises a mutation at position 613 of the amino acid sequence, which has an asparagine residue in the wild type sequence. In some embodiments, the asparagine residue at position 613 is replaced by an alanine residue (N613A) In some embodiments, the adenosine deaminase comprises a mutation at position 613 of the amino acid sequence, which has an asparagine residue in the wild type sequence. In some embodiments, the asparagine residue at position 613 is replaced by a glutamic acid residue (N613E). In some embodiments, the adenosine deaminase comprises mutation N613I. In some embodiments, the adenosine deaminase comprises mutation N613L. In some embodiments, the adenosine deaminase comprises mutation N613V. In some embodiments, the adenosine deaminase comprises mutation N613F. In some embodiments, the adenosine deaminase comprises mutation N613M. In some embodiments, the adenosine deaminase comprises mutation N613C. In some embodiments, the adenosine deaminase comprises mutation N613G. In some embodiments, the adenosine deaminase comprises mutation N613P. In some embodiments, the adenosine deaminase comprises mutation N613T. In some embodiments, the adenosine deaminase comprises mutation N613S. In some embodiments, the adenosine deaminase comprises mutation N613Y. In some embodiments, the adenosine deaminase comprises mutation N613W. In some embodiments, the adenosine deaminase comprises mutation N613Q. In some embodiments, the adenosine deaminase comprises mutation N613H. In some embodiments, the adenosine deaminase comprises mutation N613D. In some embodiments, the mutations at N613 described above are further made in combination with a E488Q mutation.

[0681] In some embodiments, to improve editing efficiency, the adenosine deaminase may comprise one or more of the mutations: G336D, G487A, G487V, E488Q, E488H, E488R, E488N, E488A, E488S, E488M, T490C, T490S, V493T, V493S, V493A, V493R, V493D, V493P, V493G, N597K, N597R, N597A, N597E, N597H, N597G, N597Y, A589V, S599T, N613K, N613R, N613A, N613E, based on amino acid sequence positions of hADAR2-D, and mutations in a homologous ADAR protein corresponding to the above.

[0682] In some embodiments, to reduce editing efficiency, the adenosine deaminase may comprise one or more of the mutations: E488F, E488L, E488W, T490A, T490F, T490Y, T490R, T490K, T490P, T490E, N597F, based on amino acid sequence positions of hADAR2-D, and mutations in a homologous ADAR protein corresponding to the above. In particular embodiments, it can be of interest to use an adenosine deaminase enzyme with reduced efficacy to reduce off-target effects.

[0683] In some embodiments, to reduce off-target effects, the adenosine deaminase comprises one or more of mutations at R348, V351, T375, K376, E396, C451, R455, N473, R474, K475, R477, R481, S486, E488, T490, 5495, R510, based on amino acid sequence positions of hADAR2-D, and mutations in a homologous ADAR protein corresponding to the above. In some embodiments, the adenosine deaminase comprises mutation at E488 and one or more additional positions selected from R348, V351, T375, K376, E396, C451, R455, N473, R474, K475, R477, R481, S486, T490, S495, R510. In some embodiments, the adenosine deaminase comprises mutation at T375, and optionally at one or more additional positions. In some embodiments, the adenosine deaminase comprises mutation at N473, and optionally at one or more additional positions. In some embodiments, the adenosine deaminase comprises mutation at V351, and optionally at one or more additional positions. In some embodiments, the adenosine deaminase comprises mutation at E488 and T375, and optionally at one or more additional positions. In some embodiments, the adenosine deaminase comprises mutation at E488 and N473, and optionally at one or more additional positions. In some embodiments, the adenosine deaminase comprises mutation E488 and V351, and optionally at one or more additional positions. In some embodiments, the adenosine deaminase comprises mutation at E488 and one or more of T375, N473, and V351.

[0684] In some embodiments, to reduce off-target effects, the adenosine deaminase comprises one or more of mutations selected from R348E, V351L, T375G, T375S, R455G, R455S, R455E, N473D, R474E, K475Q, R477E, R481E, S486T, E488Q, T490A, T490S, S495T, and R510E, based on amino acid sequence positions of hADAR2-D, and mutations in a homologous ADAR protein corresponding to the above. In some embodiments, the adenosine deaminase comprises mutation E488Q and one or more additional mutations selected from R348E, V351L, T375G, T375S, R455G, R455S, R455E, N473D, R474E, K475Q, R477E, R481E, S486T, T490A, T490S, S495T, and R510E. In some embodiments, the adenosine deaminase comprises mutation T375G or T375S, and optionally one or more additional mutations. In some embodiments, the adenosine deaminase comprises mutation N473D, and optionally one or more additional mutations. In some embodiments, the adenosine deaminase comprises mutation V351L, and optionally one or more additional mutations. In some embodiments, the adenosine deaminase comprises mutation E488Q, and T375G or T375G, and optionally one or more additional mutations. In some embodiments, the adenosine deaminase comprises mutation E488Q and N473D, and optionally one or more additional mutations. In some embodiments, the adenosine deaminase comprises mutation E488Q and V351L, and optionally one or more additional mutations. In some embodiments, the adenosine deaminase comprises mutation E488Q and one or more of T375G/S, N473D and V351L.

[0685] In certain examples, the adenosine deaminase protein or catalytic domain thereof has been modified to comprise a mutation at E488, preferably E488Q, of the hADAR2-D amino acid sequence, or a corresponding position in a homologous ADAR protein and/or wherein the adenosine deaminase protein or catalytic domain thereof has been modified to comprise a mutation at T375, preferably T375G of the hADAR2-D amino acid sequence, or a corresponding position in a homologous ADAR protein. In certain examples, the adenosine deaminase protein or catalytic domain thereof has been modified to comprise a mutation at E1008, preferably E1008Q, of the hADAR1d amino acid sequence, or a corresponding position in a homologous ADAR protein.

[0686] Crystal structures of the human ADAR2 deaminase domain bound to duplex RNA reveal a protein loop that binds the RNA on the 5′ side of the modification site. This 5′ binding loop is one contributor to substrate specificity differences between ADAR family members. See Wang et al., Nucleic Acids Res., 44(20):9872-9880 (2016), the content of which is incorporated herein by reference in its entirety. In addition, an ADAR2-specific RNA-binding loop was identified near the enzyme active site. See Mathews et al., Nat. Struct. Mol. Biol., 23(5):426-33 (2016), the content of which is incorporated herein by reference in its entirety. In some embodiments, the adenosine deaminase comprises one or more mutations in the RNA binding loop to improve editing specificity and/or efficiency.

[0687] In some embodiments, the adenosine deaminase comprises a mutation at alanine454 of the hADAR2-D amino acid sequence, or a corresponding position in a homologous ADAR protein. In some embodiments, the alanine residue at position 454 is replaced by a serine residue (A454S). In some embodiments, the alanine residue at position 454 is replaced by a cysteine residue (A454C). In some embodiments, the alanine residue at position 454 is replaced by an aspartic acid residue (A454D).

[0688] In some embodiments, the adenosine deaminase comprises a mutation at arginine455 of the hADAR2-D amino acid sequence, or a corresponding position in a homologous ADAR protein. In some embodiments, the arginine residue at position 455 is replaced by an alanine residue (R455A). In some embodiments, the arginine residue at position 455 is replaced by a valine residue (R455V). In some embodiments, the arginine residue at position 455 is replaced by a histidine residue (R455H). In some embodiments, the arginine residue at position 455 is replaced by a glycine residue (R455G). In some embodiments, the arginine residue at position 455 is replaced by a serine residue (R455S). In some embodiments, the arginine residue at position 455 is replaced by a glutamic acid residue (R455E). In some embodiments, the adenosine deaminase comprises mutation R455C. In some embodiments, the adenosine deaminase comprises mutation R455I. In some embodiments, the adenosine deaminase comprises mutation R455K. In some embodiments, the adenosine deaminase comprises mutation R455L. In some embodiments, the adenosine deaminase comprises mutation R455M. In some embodiments, the adenosine deaminase comprises mutation R455N. In some embodiments, the adenosine deaminase comprises mutation R455Q. In some embodiments, the adenosine deaminase comprises mutation R455F. In some embodiments, the adenosine deaminase comprises mutation R455W. In some embodiments, the adenosine deaminase comprises mutation R455P. In some embodiments, the adenosine deaminase comprises mutation R455Y. In some embodiments, the adenosine deaminase comprises mutation R455E. In some embodiments, the adenosine deaminase comprises mutation R455D. In some embodiments, the mutations at R455 described above are further made in combination with a E488Q mutation.

[0689] In some embodiments, the adenosine deaminase comprises a mutation at isoleucine456 of the hADAR2-D amino acid sequence, or a corresponding position in a homologous ADAR protein. In some embodiments, the isoleucine residue at position 456 is replaced by a valine residue (I456V). In some embodiments, the isoleucine residue at position 456 is replaced by a leucine residue (I456L). In some embodiments, the isoleucine residue at position 456 is replaced by an aspartic acid residue (I456D).

[0690] In some embodiments, the adenosine deaminase comprises a mutation at phenylalanine457 of the hADAR2-D amino acid sequence, or a corresponding position in a homologous ADAR protein. In some embodiments, the phenylalanine residue at position 457 is replaced by a tyrosine residue (F457Y). In some embodiments, the phenylalanine residue at position 457 is replaced by an arginine residue (F457R). In some embodiments, the phenylalanine residue at position 457 is replaced by a glutamic acid residue (F457E).

[0691] In some embodiments, the adenosine deaminase comprises a mutation at serine458 of the hADAR2-D amino acid sequence, or a corresponding position in a homologous ADAR protein. In some embodiments, the serine residue at position 458 is replaced by a valine residue (S458V). In some embodiments, the serine residue at position 458 is replaced by a phenylalanine residue (S458F). In some embodiments, the serine residue at position 458 is replaced by a proline residue (S458P). In some embodiments, the adenosine deaminase comprises mutation S458I. In some embodiments, the adenosine deaminase comprises mutation S458L. In some embodiments, the adenosine deaminase comprises mutation S458M. In some embodiments, the adenosine deaminase comprises mutation S458C. In some embodiments, the adenosine deaminase comprises mutation S458A. In some embodiments, the adenosine deaminase comprises mutation S458G. In some embodiments, the adenosine deaminase comprises mutation S458T. In some embodiments, the adenosine deaminase comprises mutation S458Y. In some embodiments, the adenosine deaminase comprises mutation S458W. In some embodiments, the adenosine deaminase comprises mutation S458Q. In some embodiments, the adenosine deaminase comprises mutation S458N. In some embodiments, the adenosine deaminase comprises mutation S458H. In some embodiments, the adenosine deaminase comprises mutation S458E. In some embodiments, the adenosine deaminase comprises mutation S458D. In some embodiments, the adenosine deaminase comprises mutation S458K. In some embodiments, the adenosine deaminase comprises mutation S458R. In some embodiments, the mutations at 5458 described above are further made in combination with a E488Q mutation.

[0692] In some embodiments, the adenosine deaminase comprises a mutation at proline459 of the hADAR2-D amino acid sequence, or a corresponding position in a homologous ADAR protein. In some embodiments, the proline residue at position 459 is replaced by a cysteine residue (P459C). In some embodiments, the proline residue at position 459 is replaced by a histidine residue (P459H). In some embodiments, the proline residue at position 459 is replaced by a tryptophan residue (P459W).

[0693] In some embodiments, the adenosine deaminase comprises a mutation at histidine460 of the hADAR2-D amino acid sequence, or a corresponding position in a homologous ADAR protein. In some embodiments, the histidine residue at position 460 is replaced by an arginine residue (H460R). In some embodiments, the histidine residue at position 460 is replaced by an isoleucine residue (H460I). In some embodiments, the histidine residue at position 460 is replaced by a proline residue (H460P). In some embodiments, the adenosine deaminase comprises mutation H460L. In some embodiments, the adenosine deaminase comprises mutation H460V. In some embodiments, the adenosine deaminase comprises mutation H460F. In some embodiments, the adenosine deaminase comprises mutation H460M. In some embodiments, the adenosine deaminase comprises mutation H460C. In some embodiments, the adenosine deaminase comprises mutation H460A. In some embodiments, the adenosine deaminase comprises mutation H460G. In some embodiments, the adenosine deaminase comprises mutation H460T. In some embodiments, the adenosine deaminase comprises mutation H460S. In some embodiments, the adenosine deaminase comprises mutation H460Y. In some embodiments, the adenosine deaminase comprises mutation H460W. In some embodiments, the adenosine deaminase comprises mutation H460Q. In some embodiments, the adenosine deaminase comprises mutation H460N. In some embodiments, the adenosine deaminase comprises mutation H460E. In some embodiments, the adenosine deaminase comprises mutation H460D. In some embodiments, the adenosine deaminase comprises mutation H460K. In some embodiments, the mutations at H460 described above are further made in combination with a E488Q mutation.

[0694] In some embodiments, the adenosine deaminase comprises a mutation at proline462 of the hADAR2-D amino acid sequence, or a corresponding position in a homologous ADAR protein. In some embodiments, the proline residue at position 462 is replaced by a serine residue (P462S). In some embodiments, the proline residue at position 462 is replaced by a tryptophan residue (P462W). In some embodiments, the proline residue at position 462 is replaced by a glutamic acid residue (P462E).

[0695] In some embodiments, the adenosine deaminase comprises a mutation at aspartic acid469 of the hADAR2-D amino acid sequence, or a corresponding position in a homologous ADAR protein. In some embodiments, the aspartic acid residue at position 469 is replaced by a glutamine residue (D469Q). In some embodiments, the aspartic acid residue at position 469 is replaced by a serine residue (D469S). In some embodiments, the aspartic acid residue at position 469 is replaced by a tyrosine residue (D469Y).

[0696] In some embodiments, the adenosine deaminase comprises a mutation at arginine470 of the hADAR2-D amino acid sequence, or a corresponding position in a homologous ADAR protein. In some embodiments, the arginine residue at position 470 is replaced by an alanine residue (R470A). In some embodiments, the arginine residue at position 470 is replaced by an isoleucine residue (R470I). In some embodiments, the arginine residue at position 470 is replaced by an aspartic acid residue (R470D).

[0697] In some embodiments, the adenosine deaminase comprises a mutation at histidine471 of the hADAR2-D amino acid sequence, or a corresponding position in a homologous ADAR protein. In some embodiments, the histidine residue at position 471 is replaced by a lysine residue (H471K). In some embodiments, the histidine residue at position 471 is replaced by a threonine residue (H471T). In some embodiments, the histidine residue at position 471 is replaced by a valine residue (H471V).

[0698] In some embodiments, the adenosine deaminase comprises a mutation at proline472 of the hADAR2-D amino acid sequence, or a corresponding position in a homologous ADAR protein. In some embodiments, the proline residue at position 472 is replaced by a lysine residue (P472K). In some embodiments, the proline residue at position 472 is replaced by a threonine residue (P472T). In some embodiments, the proline residue at position 472 is replaced by an aspartic acid residue (P472D).

[0699] In some embodiments, the adenosine deaminase comprises a mutation at asparagine473 of the hADAR2-D amino acid sequence, or a corresponding position in a homologous ADAR protein. In some embodiments, the asparagine residue at position 473 is replaced by an arginine residue (N473R). In some embodiments, the asparagine residue at position 473 is replaced by a tryptophan residue (N473W). In some embodiments, the asparagine residue at position 473 is replaced by a proline residue (N473P). In some embodiments, the asparagine residue at position 473 is replaced by an aspartic acid residue (N473D).

[0700] In some embodiments, the adenosine deaminase comprises a mutation at arginine 474 of the hADAR2-D amino acid sequence, or a corresponding position in a homologous ADAR protein. In some embodiments, the arginine residue at position 474 is replaced by a lysine residue (R474K). In some embodiments, the arginine residue at position 474 is replaced by a glycine residue (R474G). In some embodiments, the arginine residue at position 474 is replaced by an aspartic acid residue (R474D). In some embodiments, the arginine residue at position 474 is replaced by a glutamic acid residue (R474E).

[0701] In some embodiments, the adenosine deaminase comprises a mutation at lysine475 of the hADAR2-D amino acid sequence, or a corresponding position in a homologous ADAR protein. In some embodiments, the lysine residue at position 475 is replaced by a glutamine residue (K475Q). In some embodiments, the lysine residue at position 475 is replaced by an asparagine residue (K475N). In some embodiments, the lysine residue at position 475 is replaced by an aspartic acid residue (K475D).

[0702] In some embodiments, the adenosine deaminase comprises a mutation at alanine476 of the hADAR2-D amino acid sequence, or a corresponding position in a homologous ADAR protein. In some embodiments, the alanine residue at position 476 is replaced by a serine residue (A476S). In some embodiments, the alanine residue at position 476 is replaced by an arginine residue (A476R). In some embodiments, the alanine residue at position 476 is replaced by a glutamic acid residue (A476E).

[0703] In some embodiments, the adenosine deaminase comprises a mutation at arginine477 of the hADAR2-D amino acid sequence, or a corresponding position in a homologous ADAR protein. In some embodiments, the arginine residue at position 477 is replaced by a lysine residue (R477K). In some embodiments, the arginine residue at position 477 is replaced by a threonine residue (R477T). In some embodiments, the arginine residue at position 477 is replaced by a phenylalanine residue (R477F). In some embodiments, the arginine residue at position 474 is replaced by a glutamic acid residue (R477E).

[0704] In some embodiments, the adenosine deaminase comprises a mutation at glycine478 of the hADAR2-D amino acid sequence, or a corresponding position in a homologous ADAR protein. In some embodiments, the glycine residue at position 478 is replaced by an alanine residue (G478A). In some embodiments, the glycine residue at position 478 is replaced by an arginine residue (G478R). In some embodiments, the glycine residue at position 478 is replaced by a tyrosine residue (G478Y). In some embodiments, the adenosine deaminase comprises mutation G478I. In some embodiments, the adenosine deaminase comprises mutation G478L. In some embodiments, the adenosine deaminase comprises mutation G478V. In some embodiments, the adenosine deaminase comprises mutation G478F. In some embodiments, the adenosine deaminase comprises mutation G478M. In some embodiments, the adenosine deaminase comprises mutation G478C. In some embodiments, the adenosine deaminase comprises mutation G478P. In some embodiments, the adenosine deaminase comprises mutation G478T. In some embodiments, the adenosine deaminase comprises mutation G478S. In some embodiments, the adenosine deaminase comprises mutation G478W. In some embodiments, the adenosine deaminase comprises mutation G478Q. In some embodiments, the adenosine deaminase comprises mutation G478N. In some embodiments, the adenosine deaminase comprises mutation G478H. In some embodiments, the adenosine deaminase comprises mutation G478E. In some embodiments, the adenosine deaminase comprises mutation G478D. In some embodiments, the adenosine deaminase comprises mutation G478K. In some embodiments, the mutations at G478 described above are further made in combination with a E488Q mutation.

[0705] In some embodiments, the adenosine deaminase comprises a mutation at glutamine479 of the hADAR2-D amino acid sequence, or a corresponding position in a homologous ADAR protein. In some embodiments, the glutamine residue at position 479 is replaced by an asparagine residue (Q479N). In some embodiments, the glutamine residue at position 479 is replaced by a serine residue (Q479S). In some embodiments, the glutamine residue at position 479 is replaced by a proline residue (Q479P).

[0706] In some embodiments, the adenosine deaminase comprises a mutation at arginine348 of the hADAR2-D amino acid sequence, or a corresponding position in a homologous ADAR protein. In some embodiments, the arginine residue at position 348 is replaced by an alanine residue (R348A). In some embodiments, the arginine residue at position 348 is replaced by a glutamic acid residue (R348E).

[0707] In some embodiments, the adenosine deaminase comprises a mutation at valine351 of the hADAR2-D amino acid sequence, or a corresponding position in a homologous ADAR protein. In some embodiments, the valine residue at position 351 is replaced by a leucine residue (V351L). In some embodiments, the adenosine deaminase comprises mutation V351Y. In some embodiments, the adenosine deaminase comprises mutation V351M. In some embodiments, the adenosine deaminase comprises mutation V351T. In some embodiments, the adenosine deaminase comprises mutation V351G. In some embodiments, the adenosine deaminase comprises mutation V351A. In some embodiments, the adenosine deaminase comprises mutation V351F. In some embodiments, the adenosine deaminase comprises mutation V351E. In some embodiments, the adenosine deaminase comprises mutation V351I. In some embodiments, the adenosine deaminase comprises mutation V351C. In some embodiments, the adenosine deaminase comprises mutation V351H. In some embodiments, the adenosine deaminase comprises mutation V351P. In some embodiments, the adenosine deaminase comprises mutation V351S. In some embodiments, the adenosine deaminase comprises mutation V351K. In some embodiments, the adenosine deaminase comprises mutation V351N. In some embodiments, the adenosine deaminase comprises mutation V351W. In some embodiments, the adenosine deaminase comprises mutation V351Q. In some embodiments, the adenosine deaminase comprises mutation V351D. In some embodiments, the adenosine deaminase comprises mutation V351R. In some embodiments, the mutations at V351 described above are further made in combination with a E488Q mutation.

[0708] In some embodiments, the adenosine deaminase comprises a mutation at threonine375 of the hADAR2-D amino acid sequence, or a corresponding position in a homologous ADAR protein. In some embodiments, the threonine residue at position 375 is replaced by a glycine residue (T375G). In some embodiments, the threonine residue at position 375 is replaced by a serine residue (T375S). In some embodiments, the adenosine deaminase comprises mutation T375H. In some embodiments, the adenosine deaminase comprises mutation T375Q. In some embodiments, the adenosine deaminase comprises mutation T375C. In some embodiments, the adenosine deaminase comprises mutation T375N. In some embodiments, the adenosine deaminase comprises mutation T375M. In some embodiments, the adenosine deaminase comprises mutation T375A. In some embodiments, the adenosine deaminase comprises mutation T375W. In some embodiments, the adenosine deaminase comprises mutation T375V. In some embodiments, the adenosine deaminase comprises mutation T375R. In some embodiments, the adenosine deaminase comprises mutation T375E. In some embodiments, the adenosine deaminase comprises mutation T375K. In some embodiments, the adenosine deaminase comprises mutation T375F. In some embodiments, the adenosine deaminase comprises mutation T375I. In some embodiments, the adenosine deaminase comprises mutation T375D. In some embodiments, the adenosine deaminase comprises mutation T375P. In some embodiments, the adenosine deaminase comprises mutation T375L. In some embodiments, the adenosine deaminase comprises mutation T375Y. In some embodiments, the mutations at T375Y described above are further made in combination with an E488Q mutation.

[0709] In some embodiments, the adenosine deaminase comprises a mutation at Arg481 of the hADAR2-D amino acid sequence, or a corresponding position in a homologous ADAR protein. In some embodiments, the arginine residue at position 481 is replaced by a glutamic acid residue (R481E).

[0710] In some embodiments, the adenosine deaminase comprises a mutation at Ser486 of the hADAR2-D amino acid sequence, or a corresponding position in a homologous ADAR protein. In some embodiments, the serine residue at position 486 is replaced by a threonine residue (S486T).

[0711] In some embodiments, the adenosine deaminase comprises a mutation at Thr490 of the hADAR2-D amino acid sequence, or a corresponding position in a homologous ADAR protein. In some embodiments, the threonine residue at position 490 is replaced by an alanine residue (T490A). In some embodiments, the threonine residue at position 490 is replaced by a serine residue (T490S).

[0712] In some embodiments, the adenosine deaminase comprises a mutation at Ser495 of the hADAR2-D amino acid sequence, or a corresponding position in a homologous ADAR protein. In some embodiments, the serine residue at position 495 is replaced by a threonine residue (S495T).

[0713] In some embodiments, the adenosine deaminase comprises a mutation at Arg510 of the hADAR2-D amino acid sequence, or a corresponding position in a homologous ADAR protein. In some embodiments, the arginine residue at position 510 is replaced by a glutamine residue (R510Q). In some embodiments, the arginine residue at position 510 is replaced by an alanine residue (R510A). In some embodiments, the arginine residue at position 510 is replaced by a glutamic acid residue (R510E).

[0714] In some embodiments, the adenosine deaminase comprises a mutation at Gly593 of the hADAR2-D amino acid sequence, or a corresponding position in a homologous ADAR protein. In some embodiments, the glycine residue at position 593 is replaced by an alanine residue (G593A). In some embodiments, the glycine residue at position 593 is replaced by a glutamic acid residue (G593E).

[0715] In some embodiments, the adenosine deaminase comprises a mutation at Lys594 of the hADAR2-D amino acid sequence, or a corresponding position in a homologous ADAR protein. In some embodiments, the lysine residue at position 594 is replaced by an alanine residue (K594A).

[0716] In some embodiments, the adenosine deaminase comprises a mutation at any one or more of positions A454, R455, 1456, F457, 5458, P459, H460, P462, D469, R470, H471, P472, N473, R474, K475, A476, R477, G478, Q479, R348, R510, G593, K594 of the hADAR2-D amino acid sequence, or a corresponding position in a homologous ADAR protein.

[0717] In some embodiments, the adenosine deaminase comprises any one or more of mutations A454S, A454C, A454D, R455A, R455V, R455H, I456V, I456L, I456D, F457Y, F457R, F457E, S458V, S458F, S458P, P459C, P459H, P459W, H460R, H460I, H460P, P462S, P462W, P462E, D469Q, D469S, D469Y, R470A, R470I, R470D, H471K, H471T, H471V, P472K, P472T, P472D, N473R, N473W, N473P, R474K, R474G, R474D, K475Q, K475N, K475D, A476S, A476R, A476E, R477K, R477T, R477F, G478A, G478R, G478Y, Q479N, Q479S, Q479P, R348A, R510Q, R510A, G593A, G593E, K594A of the hADAR2-D amino acid sequence, or a corresponding position in a homologous ADAR protein.

[0718] In some embodiments, the adenosine deaminase comprises a mutation at any one or more of positions T375, V351, G478, 5458, H460 of the hADAR2-D amino acid sequence, or a corresponding position in a homologous ADAR protein, optionally in combination a mutation at E488. In some embodiments, the adenosine deaminase comprises one or more of mutations selected from T375G, T375C, T375H, T375Q, V351M, V351T, V351Y, G478R, S458F, H460I, optionally in combination with E488Q.

[0719] In some embodiments, the adenosine deaminase comprises one or more of mutations selected from T375H, T375Q, V351M, V351Y, H460P, optionally in combination with E488Q.

[0720] In some embodiments, the adenosine deaminase comprises mutations T375S and S458F, optionally in combination with E488Q.

[0721] In some embodiments, the adenosine deaminase comprises a mutation at two or more of positions T375, N473, R474, G478, S458, P459, V351, R455, R455, T490, R348, Q479 of the hADAR2-D amino acid sequence, or a corresponding position in a homologous ADAR protein, optionally in combination a mutation at E488. In some embodiments, the adenosine deaminase comprises two or more of mutations selected from T375G, T375S, N473D, R474E, G478R, S458F, P459W, V351L, R455G, R455S, T490A, R348E, Q479P, optionally in combination with E488Q.

[0722] In some embodiments, the adenosine deaminase comprises mutations T375G and V351L. In some embodiments, the adenosine deaminase comprises mutations T375G and R455G. In some embodiments, the adenosine deaminase comprises mutations T375G and R455S. In some embodiments, the adenosine deaminase comprises mutations T375G and T490A. In some embodiments, the adenosine deaminase comprises mutations T375G and R348E. In some embodiments, the adenosine deaminase comprises mutations T375S and V351L. In some embodiments, the adenosine deaminase comprises mutations T375S and R455G. In some embodiments, the adenosine deaminase comprises mutations T375S and R455S. In some embodiments, the adenosine deaminase comprises mutations T375S and T490A. In some embodiments, the adenosine deaminase comprises mutations T375S and R348E. In some embodiments, the adenosine deaminase comprises mutations N473D and V351L. In some embodiments, the adenosine deaminase comprises mutations N473D and R455G. In some embodiments, the adenosine deaminase comprises mutations N473D and R455S. In some embodiments, the adenosine deaminase comprises mutations N473D and T490A. In some embodiments, the adenosine deaminase comprises mutations N473D and R348E. In some embodiments, the adenosine deaminase comprises mutations R474E and V351L. In some embodiments, the adenosine deaminase comprises mutations R474E and R455G. In some embodiments, the adenosine deaminase comprises mutations R474E and R455S. In some embodiments, the adenosine deaminase comprises mutations R474E and T490A. In some embodiments, the adenosine deaminase comprises mutations R474E and R348E. In some embodiments, the adenosine deaminase comprises mutations S458F and T375G. In some embodiments, the adenosine deaminase comprises mutations S458F and T375S. In some embodiments, the adenosine deaminase comprises mutations S458F and N473D. In some embodiments, the adenosine deaminase comprises mutations S458F and R474E. In some embodiments, the adenosine deaminase comprises mutations S458F and G478R. In some embodiments, the adenosine deaminase comprises mutations G478R and T375G. In some embodiments, the adenosine deaminase comprises mutations G478R and T375S. In some embodiments, the adenosine deaminase comprises mutations G478R and N473D. In some embodiments, the adenosine deaminase comprises mutations G478R and R474E. In some embodiments, the adenosine deaminase comprises mutations P459W and T375G. In some embodiments, the adenosine deaminase comprises mutations P459W and T375S. In some embodiments, the adenosine deaminase comprises mutations P459W and N473D. In some embodiments, the adenosine deaminase comprises mutations P459W and R474E. In some embodiments, the adenosine deaminase comprises mutations P459W and G478R. In some embodiments, the adenosine deaminase comprises mutations P459W and S458F. In some embodiments, the adenosine deaminase comprises mutations Q479P and T375G. In some embodiments, the adenosine deaminase comprises mutations Q479P and T375S. In some embodiments, the adenosine deaminase comprises mutations Q479P and N473D. In some embodiments, the adenosine deaminase comprises mutations Q479P and R474E. In some embodiments, the adenosine deaminase comprises mutations Q479P and G478R. In some embodiments, the adenosine deaminase comprises mutations Q479P and S458F. In some embodiments, the adenosine deaminase comprises mutations Q479P and P459W. All mutations described in this paragraph may also further be made in combination with a E488Q mutations.

[0723] In some embodiments, the adenosine deaminase comprises a mutation at any one or more of positions K475, Q479, P459, G478, S458 of the hADAR2-D amino acid sequence, or a corresponding position in a homologous ADAR protein, optionally in combination a mutation at E488. In some embodiments, the adenosine deaminase comprises one or more of mutations selected from K475N, Q479N, P459W, G478R, S458P, S458F, optionally in combination with E488Q.

[0724] In some embodiments, the adenosine deaminase comprises a mutation at any one or more of positions T375, V351, R455, H460, A476 of the hADAR2-D amino acid sequence, or a corresponding position in a homologous ADAR protein, optionally in combination a mutation at E488. In some embodiments, the adenosine deaminase comprises one or more of mutations selected from T375G, T375C, T375H, T375Q, V351M, V351T, V351Y, R455H, H460P, H460I, A476E, optionally in combination with E488Q.

[0725] In certain embodiments, improvement of editing and reduction of off-target modification is achieved by chemical modification of gRNAs. gRNAs which are chemically modified as exemplified in Vogel et al. (2014), Angew Chem Int Ed, 53:6267-6271, doi:10.1002/anie.201402634 (incorporated herein by reference in its entirety) reduce off-target activity and improve on-target efficiency. 2′-O-methyl and phosphothioate modified guide RNAs in general improve editing efficiency in cells.

[0726] ADAR has been known to demonstrate a preference for neighboring nucleotides on either side of the edited A (www.nature.com/nsmb/journal/v23/n5/full/nsmb.3203.html, Matthews et al. (2017), Nature Structural Mol Biol, 23(5): 426-433, incorporated herein by reference in its entirety). Accordingly, in certain embodiments, the gRNA, target, and/or ADAR is selected optimized for motif preference.

[0727] Intentional mismatches have been demonstrated in vitro to allow for editing of non-preferred motifs (academic.oup.com/nar/article-lookup/doi/10.1093/nar/gku272; Schneider et al (2014), Nucleic Acid Res, 42(10):e87); Fukuda et al. (2017), Scientific Reports, 7, doi:10.1038/srep41478, incorporated herein by reference in its entirety). Accordingly, in certain embodiments, to enhance RNA editing efficiency on non-preferred 5′ or 3′ neighboring bases, intentional mismatches in neighboring bases are introduced.

[0728] In some embodiments, the adenosine deaminase may be a tRNA-specific adenosine deaminase or a variant thereof. In some embodiments, the adenosine deaminase may comprise one or more of the mutations: W23L, W23R, R26G, H36L, N37S, P48S, P48T, P48A, I49V, R51L, N72D, L84F, S97C, A106V, D108N, H123Y, G125A, A142N, S146C, D147Y, R152H, R152P, E155V, I156F, K157N, K161T, based on amino acid sequence positions of E. coli TadA, and mutations in a homologous deaminase protein corresponding to the above. In some embodiments, the adenosine deaminase may comprise one or more of the mutations: D108N based on amino acid sequence positions of E. coli TadA, and mutations in a homologous deaminase protein corresponding to the above. In some embodiments, the adenosine deaminase may comprise one or more of the mutations: A106V, D108N, based on amino acid sequence positions of E. coli TadA, and mutations in a homologous deaminase protein corresponding to the above. In some embodiments, the adenosine deaminase may comprise one or more of the mutations: A106V, D108N, D147Y, E155V, based on amino acid sequence positions of E. coli TadA, and mutations in a homologous deaminase protein corresponding to the above. In some embodiments, the adenosine deaminase may comprise one or more of the mutations: A106V, D108N, based on amino acid sequence positions of E. coli TadA, and mutations in a homologous deaminase protein corresponding to the above. In some embodiments, the adenosine deaminase may comprise one or more of the mutations: A106V, D108N, D147Y, E155V, L84F, H123Y, I156F, based on amino acid sequence positions of E. coli TadA, and mutations in a homologous deaminase protein corresponding to the above. In some embodiments, the adenosine deaminase may comprise one or more of the mutations: A106V, D108N, D147Y, E155V, L84F, H123Y, I156F, A142N, based on amino acid sequence positions of E. coli TadA, and mutations in a homologous deaminase protein corresponding to the above. In some embodiments, the adenosine deaminase may comprise one or more of the mutations: A106V, D108N, D147Y, E155V, L84F, H123Y, I156F, H36L, R51L, S146C, K157N, based on amino acid sequence positions of E. coli TadA, and mutations in a homologous deaminase protein corresponding to the above. In some embodiments, the adenosine deaminase may comprise one or more of the mutations: A106V, D108N, D147Y, E155V, L84F, H123Y, I156F, H36L, R51L, S146C, K157N, P48S, based on amino acid sequence positions of E. coli TadA, and mutations in a homologous deaminase protein corresponding to the above. In some embodiments, the adenosine deaminase may comprise one or more of the mutations: A106V, D108N, D147Y, E155V, L84F, H123Y, I156F, H36L, R51L, S146C, K157N, P48S, A142N, based on amino acid sequence positions of E. coli TadA, and mutations in a homologous deaminase protein corresponding to the above. In some embodiments, the adenosine deaminase may comprise one or more of the mutations: A106V, D108N, D147Y, E155V, L84F, H123Y, I156F, H36L, R51L, S146C, K157N, P48S, W23R, P48A, based on amino acid sequence positions of E. coli TadA, and mutations in a homologous deaminase protein corresponding to the above. In some embodiments, the adenosine deaminase may comprise one or more of the mutations: A106V, D108N, D147Y, E155V, L84F, H123Y, I156F, H36L, R51L, S146C, K157N, P48S, W23R, P48A, A142N, based on amino acid sequence positions of E. coli TadA, and mutations in a homologous deaminase protein corresponding to the above. In some embodiments, the adenosine deaminase may comprise one or more of the mutations: A106V, D108N, D147Y, E155V, L84F, H123Y, I156F, H36L, R51L, S146C, K157N, P48S, W23R, P48A, R152P, based on amino acid sequence positions of E. coli TadA, and mutations in a homologous deaminase protein corresponding to the above. In some embodiments, the adenosine deaminase may comprise one or more of the mutations: A106V, D108N, D147Y, E155V, L84F, H123Y, I156F, H36L, R51L, S146C, K157N, P48S, W23R, P48A, R152P, A142N, based on amino acid sequence positions of E. coli TadA, and mutations in a homologous deaminase protein corresponding to the above.

[0729] Results suggest that A's opposite C's in the targeting window of the ADAR deaminase domain are preferentially edited over other bases. Additionally, A's base-paired with U's within a few bases of the targeted base show low levels of editing by CRISPR-Cas-ADAR fusions, suggesting that there is flexibility for the enzyme to edit multiple A's. These two observations suggest that multiple A's in the activity window of CRISPR-Cas-ADAR fusions could be specified for editing by mismatching all A's to be edited with C's. Accordingly, in certain embodiments, multiple A:C mismatches in the activity window are designed to create multiple A:I edits. In certain embodiments, to suppress potential off-target editing in the activity window, non-target A's are paired with A's or G's.

[0730] The terms “editing specificity” and “editing preference” are used interchangeably herein to refer to the extent of A-to-I editing at a particular adenosine site in a double-stranded substrate. In some embodiment, the substrate editing preference is determined by the 5′ nearest neighbor and/or the 3′ nearest neighbor of the target adenosine residue. In some embodiments, the adenosine deaminase has preference for the 5′ nearest neighbor of the substrate ranked as U>A>C>G (“>” indicates greater preference). In some embodiments, the adenosine deaminase has preference for the 3′ nearest neighbor of the substrate ranked as G>C˜A>U (“>” indicates greater preference; “˜” indicates similar preference). In some embodiments, the adenosine deaminase has preference for the 3′ nearest neighbor of the substrate ranked as G>C>U˜A (“>” indicates greater preference; “˜” indicates similar preference). In some embodiments, the adenosine deaminase has preference for the 3′ nearest neighbor of the substrate ranked as G>C>A>U (“>” indicates greater preference). In some embodiments, the adenosine deaminase has preference for the 3′ nearest neighbor of the substrate ranked as C˜G˜A>U (“>” indicates greater preference; “˜” indicates similar preference). In some embodiments, the adenosine deaminase has preference for a triplet sequence containing the target adenosine residue ranked as TAG>AAG>CAC>AAT>GAA>GAC (“>” indicates greater preference), the center A being the target adenosine residue.

[0731] In some embodiments, the substrate editing preference of an adenosine deaminase is affected by the presence or absence of a nucleic acid binding domain in the adenosine deaminase protein. In some embodiments, to modify substrate editing preference, the deaminase domain is connected with a double-strand RNA binding domain (dsRBD) or a double-strand RNA binding motif (dsRBM). In some embodiments, the dsRBD or dsRBM may be derived from an ADAR protein, such as hADAR1 or hADAR2. In some embodiments, a full length ADAR protein that comprises at least one dsRBD and a deaminase domain is used. In some embodiments, the one or more dsRBM or dsRBD is at the N-terminus of the deaminase domain. In other embodiments, the one or more dsRBM or dsRBD is at the C-terminus of the deaminase domain.

[0732] In some embodiments, the substrate editing preference of an adenosine deaminase is affected by amino acid residues near or in the active center of the enzyme. In some embodiments, to modify substrate editing preference, the adenosine deaminase may comprise one or more of the mutations: G336D, G487R, G487K, G487W, G487Y, E488Q, E488N, T490A, V493A, V493T, V493S, N597K, N597R, A589V, S599T, N613K, N613R, based on amino acid sequence positions of hADAR2-D, and mutations in a homologous ADAR protein corresponding to the above.

[0733] Particularly, in some embodiments, to reduce editing specificity, the adenosine deaminase can comprise one or more of mutations E488Q, V493A, N597K, N613K, based on amino acid sequence positions of hADAR2-D, and mutations in a homologous ADAR protein corresponding to the above. In some embodiments, to increase editing specificity, the adenosine deaminase can comprise mutation T490A.

[0734] In some embodiments, to increase editing preference for target adenosine (A) with an immediate 5′ G, such as substrates comprising the triplet sequence GAC, the center A being the target adenosine residue, the adenosine deaminase can comprise one or more of mutations G336D, E488Q, E488N, V493T, V493S, V493A, A589V, N597K, N597R, S599T, N613K, N613R, based on amino acid sequence positions of hADAR2-D, and mutations in a homologous ADAR protein corresponding to the above.

[0735] Particularly, in some embodiments, the adenosine deaminase comprises mutation E488Q or a corresponding mutation in a homologous ADAR protein for editing substrates comprising the following triplet sequences: GAC, GAA, GAU, GAG, CAU, AAU, UAC, the center A being the target adenosine residue.

[0736] In some embodiments, the adenosine deaminase comprises the wild-type amino acid sequence of hADAR1-D. In some embodiments, the adenosine deaminase comprises one or more mutations in the hADAR1-D sequence, such that the editing efficiency, and/or substrate editing preference of hADAR1-D is changed according to specific needs.

[0737] In some embodiments, the adenosine deaminase comprises a mutation at Glycine1007 of the hADAR1-D amino acid sequence, or a corresponding position in a homologous ADAR protein. In some embodiments, the glycine residue at position 1007 is replaced by a non-polar amino acid residue with relatively small side chains. For example, in some embodiments, the glycine residue at position 1007 is replaced by an alanine residue (G1007A). In some embodiments, the glycine residue at position 1007 is replaced by a valine residue (G1007V). In some embodiments, the glycine residue at position 1007 is replaced by an amino acid residue with relatively large side chains. In some embodiments, the glycine residue at position 1007 is replaced by an arginine residue (G1007R). In some embodiments, the glycine residue at position 1007 is replaced by a lysine residue (G1007K). In some embodiments, the glycine residue at position 1007 is replaced by a tryptophan residue (G1007W). In some embodiments, the glycine residue at position 1007 is replaced by a tyrosine residue (G1007Y). Additionally, in other embodiments, the glycine residue at position 1007 is replaced by a leucine residue (G1007L). In other embodiments, the glycine residue at position 1007 is replaced by a threonine residue (G1007T). In other embodiments, the glycine residue at position 1007 is replaced by a serine residue (G1007S).

[0738] In some embodiments, the adenosine deaminase comprises a mutation at glutamic acid1008 of the hADAR1-D amino acid sequence, or a corresponding position in a homologous ADAR protein. In some embodiments, the glutamic acid residue at position 1008 is replaced by a polar amino acid residue having a relatively large side chain. In some embodiments, the glutamic acid residue at position 1008 is replaced by a glutamine residue (E1008Q). In some embodiments, the glutamic acid residue at position 1008 is replaced by a histidine residue (E1008H). In some embodiments, the glutamic acid residue at position 1008 is replaced by an arginine residue (E1008R). In some embodiments, the glutamic acid residue at position 1008 is replaced by a lysine residue (E1008K). In some embodiments, the glutamic acid residue at position 1008 is replaced by a nonpolar or small polar amino acid residue. In some embodiments, the glutamic acid residue at position 1008 is replaced by a phenylalanine residue (E1008F). In some embodiments, the glutamic acid residue at position 1008 is replaced by a tryptophan residue (E1008W). In some embodiments, the glutamic acid residue at position 1008 is replaced by a glycine residue (E1008G). In some embodiments, the glutamic acid residue at position 1008 is replaced by an isoleucine residue (E1008I). In some embodiments, the glutamic acid residue at position 1008 is replaced by a valine residue (E1008V). In some embodiments, the glutamic acid residue at position 1008 is replaced by a proline residue (E1008P). In some embodiments, the glutamic acid residue at position 1008 is replaced by a serine residue (E1008S). In other embodiments, the glutamic acid residue at position 1008 is replaced by an asparagine residue (E1008N). In other embodiments, the glutamic acid residue at position 1008 is replaced by an alanine residue (E1008A). In other embodiments, the glutamic acid residue at position 1008 is replaced by a Methionine residue (E1008M). In some embodiments, the glutamic acid residue at position 1008 is replaced by a leucine residue (E1008L).

[0739] In some embodiments, to improve editing efficiency, the adenosine deaminase may comprise one or more of the mutations: E1007S, E1007A, E1007V, E1008Q, E1008R, E1008H, E1008M, E1008N, E1008K, based on amino acid sequence positions of hADAR1-D, and mutations in a homologous ADAR protein corresponding to the above.

[0740] In some embodiments, to reduce editing efficiency, the adenosine deaminase may comprise one or more of the mutations: E1007R, E1007K, E1007Y, E1007L, E1007T, E1008G, E1008I, E1008P, E1008V, E1008F, E1008W, E1008S, E1008N, E1008K, based on amino acid sequence positions of hADAR1-D, and mutations in a homologous ADAR protein corresponding to the above.

[0741] In some embodiments, the substrate editing preference, efficiency and/or selectivity of an adenosine deaminase is affected by amino acid residues near or in the active center of the enzyme. In some embodiments, the adenosine deaminase comprises a mutation at the glutamic acid 1008 position in hADAR1-D sequence, or a corresponding position in a homologous ADAR protein. In some embodiments, the mutation is E1008R, or a corresponding mutation in a homologous ADAR protein. In some embodiments, the E1008R mutant has an increased editing efficiency for target adenosine residue that has a mismatched G residue on the opposite strand.

[0742] In some embodiments, the adenosine deaminase protein further comprises or is connected to one or more double-stranded RNA (dsRNA) binding motifs (dsRBMs) or domains (dsRBDs) for recognizing and binding to double-stranded nucleic acid substrates. In some embodiments, the interaction between the adenosine deaminase and the double-stranded substrate is mediated by one or more additional protein factor(s), including a CRISPR/CAS protein factor. In some embodiments, the interaction between the adenosine deaminase and the double-stranded substrate is further mediated by one or more nucleic acid component(s), including a guide RNA.

[0743] In certain example embodiments, directed evolution may be used to design modified ADAR proteins capable of catalyzing additional reactions besides deamination of a adenine to a hypoxanthine.

### Modified Adenosine Deaminase Having C to U Deamination Activity

[0744] In certain example embodiments, directed evolution may be used to design modified ADAR proteins capable of catalyzing additional reactions besides deamination of an adenine to a hypoxanthine. For example, the modified ADAR protein may be capable of catalyzing deamination of a cytidine to a uracil. While not bound by a particular theory, mutations that improve C to U activity may alter the shape of the binding pocket to be more amenable to the smaller cytidine base. In some cases, the modified ADAR comprise mutations on residues the catalytic core and/or residues that contact the RNA target. Examples of mutations on residues in the catalytic core include V351G and K350I., based on amino acid sequence positions of hADAR2-D, and mutations in a homologous ADAR protein corresponding to the above. Examples of mutations on residues on the residues that contact with the RNA target include S486A and S495N, based on amino acid sequence positions of hADAR2-D, and mutations in a homologous ADAR protein corresponding to the above.

[0745] In certain embodiments the adenosine deaminase is engineered to convert the activity to cytidine deaminase. Such engineered adenosine deaminase may also retain its adenosine deaminase activity, i.e., such mutated adenosine deaminase may have both adenosine deaminase and cytidine deaminase activities. Accordingly in some embodiments, the adenosine deaminase comprises one or more mutations in positions selected from E396, C451, V351, R455, T375, K376, S486, Q488, R510, K594, R348, G593, S397, H443, L444, Y445, F442, E438, T448, A353, V355, T339, P539, T339, P539, V525 I520, P462 and N579. In particular embodiments, the adenosine deaminase comprises one or more mutations in a position selected from V351, L444, V355, V525 and I520. In some embodiments, the adenosine deaminase may comprise one or more of mutations at E488, V351, S486, T375, S370, P462, N597, based on amino acid sequence positions of hADAR2-D, and mutations in a homologous ADAR protein corresponding to the above.

[0746] In some embodiments, the adenosine deaminase may comprise one or more of the mutations: E488Q based on amino acid sequence positions of hADAR2-D, and mutations in a homologous ADAR protein corresponding to the above. In some embodiments, the adenosine deaminase may comprise one or more of the mutations: E488Q, V351G, based on amino acid sequence positions of hADAR2-D, and mutations in a homologous ADAR protein corresponding to the above. In some embodiments, the adenosine deaminase may comprise one or more of the mutations: E488Q, V351G, S486A, based on amino acid sequence positions of hADAR2-D, and mutations in a homologous ADAR protein corresponding to the above. In some embodiments, the adenosine deaminase may comprise one or more of the mutations: E488Q, V351G, S486A, T375S, based on amino acid sequence positions of hADAR2-D, and mutations in a homologous ADAR protein corresponding to the above. In some embodiments, the adenosine deaminase may comprise one or more of the mutations: E488Q, V351G, S486A, T375S, S370C, based on amino acid sequence positions of hADAR2-D, and mutations in a homologous ADAR protein corresponding to the above. In some embodiments, the adenosine deaminase may comprise one or more of the mutations: E488Q, V351G, S486A, T375S, S370C, P462A, based on amino acid sequence positions of hADAR2-D, and mutations in a homologous ADAR protein corresponding to the above. In some embodiments, the adenosine deaminase may comprise one or more of the mutations: E488Q, V351G, S486A, T375S, S370C, P462A, N597I, based on amino acid sequence positions of hADAR2-D, and mutations in a homologous ADAR protein corresponding to the above. In some embodiments, the adenosine deaminase may comprise one or more of the mutations: E488Q, V351G, S486A, T375S, S370C, P462A, N597I, L332I, based on amino acid sequence positions of hADAR2-D, and mutations in a homologous ADAR protein corresponding to the above. In some embodiments, the adenosine deaminase may comprise one or more of the mutations: E488Q, V351G, S486A, T375S, S370C, P462A, N597I, L332I, I398V, based on amino acid sequence positions of hADAR2-D, and mutations in a homologous ADAR protein corresponding to the above. In some embodiments, the adenosine deaminase may comprise one or more of the mutations: E488Q, V351G, S486A, T375S, S370C, P462A, N597I, L332I, I398V, K350I, based on amino acid sequence positions of hADAR2-D, and mutations in a homologous ADAR protein corresponding to the above. In some embodiments, the adenosine deaminase may comprise one or more of the mutations: E488Q, V351G, S486A, T375S, S370C, P462A, N597I, L332I, I398V, K350I, M383L, based on amino acid sequence positions of hADAR2-D, and mutations in a homologous ADAR protein corresponding to the above. In some embodiments, the adenosine deaminase may comprise one or more of the mutations: E488Q, V351G, S486A, T375S, S370C, P462A, N597I, L332I, I398V, K350I, M383L, D619G, based on amino acid sequence positions of hADAR2-D, and mutations in a homologous ADAR protein corresponding to the above. In some embodiments, the adenosine deaminase may comprise one or more of the mutations: E488Q, V351G, S486A, T375S, S370C, P462A, N597I, L332I, I398V, K350I, M383L, D619G, S582T, based on amino acid sequence positions of hADAR2-D, and mutations in a homologous ADAR protein corresponding to the above. In some embodiments, the adenosine deaminase may comprise one or more of the mutations: E488Q, V351G, S486A, T375S, S370C, P462A, N597I, L332I, I398V, K350I, M383L, D619G, S582T, V440I based on amino acid sequence positions of hADAR2-D, and mutations in a homologous ADAR protein corresponding to the above. In some embodiments, the adenosine deaminase may comprise one or more of the mutations: E488Q, V351G, S486A, T375S, S370C, P462A, N597I, L332I, I398V, K350I, M383L, D619G, S582T, V440I, S495N based on amino acid sequence positions of hADAR2-D, and mutations in a homologous ADAR protein corresponding to the above. In some embodiments, the adenosine deaminase may comprise one or more of the mutations: E488Q, V351G, S486A, T375S, S370C, P462A, N597I, L332I, I398V, K350I, M383L, D619G, S582T, V440I, S495N, K418E based on amino acid sequence positions of hADAR2-D, and mutations in a homologous ADAR protein corresponding to the above. In some embodiments, the adenosine deaminase may comprise one or more of the mutations: E488Q, V351G, S486A, T375S, S370C, P462A, N597I, L332I, I398V, K350I, M383L, D619G, S582T, V440I, S495N, K418E, S661T based on amino acid sequence positions of hADAR2-D, and mutations in a homologous ADAR protein corresponding to the above. In some examples, provided herein includes a mutated adenosine deaminase e.g., an adenosine deaminase comprising one or more mutations of E488Q, V351G, S486A, T375S, S370C, P462A, N597I, L332I, I398V, K350I, M383L, D619G, S582T, V440I, S495N, K418E, S661T (based on amino acid sequence positions of hADAR2-D, and mutations in a homologous ADAR protein corresponding to the above), fused with a dead CRISPR-Cas protein or CRISPR-Cas nickase. In a particular example, provided herein includes a mutated adenosine deaminase e.g., an adenosine deaminase comprising E488Q, V351G, S486A, T375S, S370C, P462A, N597I, L332I, I398V, K350I, M383L, D619G, S582T, V440I, S495N, K418E, and S661T (based on amino acid sequence positions of hADAR2-D, and mutations in a homologous ADAR protein corresponding to the above), fused with a dead CRISPR-Cas protein or a CRISPR-Cas nickase.

[0747] In some embodiments, the modified adenosine deaminase having C-to-U deamination activity comprises a mutation at any one or more of positions V351, T375, R455, and E488 of the hADAR2-D amino acid sequence, or a corresponding position in a homologous ADAR protein. In some embodiments, the adenosine deaminase comprises mutation E488Q. In some embodiments, the adenosine deaminase comprises one or more of mutations selected from V351I, V351L, V351F, V351M, V351C, V351A, V351G, V351P, V351T, V351S, V351Y, V351W, V351Q, V351N, V351H, V351E, V351D, V351K, V351R, T375I, T375L, T375V, T375F, T375M, T375C, T375A, T375G, T375P, T375S, T375Y, T375W, T375Q, T375N, T375H, T375E, T375D, T375K, T375R, R455I, R455L, R455V, R455F, R455M, R455C, R455A, R455G, R455P, R455T, R455S, R455Y, R455W, R455Q, R455N, R455H, R455E, R455D, R455K. In some embodiments, the adenosine deaminase comprises mutation E488Q, and further comprises one or more of mutations selected from V351I, V351L, V351F, V351M, V351C, V351A, V351G, V351P, V351T, V351S, V351Y, V351W, V351Q, V351N, V351H, V351E, V351D, V351K, V351R, T375I, T375L, T375V, T375F, T375M, T375C, T375A, T375G, T375P, T375S, T375Y, T375W, T375Q, T375N, T375H, T375E, T375D, T375K, T375R, R455I, R455L, R455V, R455F, R455M, R455C, R455A, R455G, R455P, R455T, R455S, R455Y, R455W, R455Q, R455N, R455H, R455E, R455D, R455K.

[0748] In some cases, the modified ADAR may further comprise one or more mutations that reduce off-target activities. In cases where modified ADAR has C-to-U deamination activity, such mutations may reduce A to I off-target activity and increase C-to-U on-target deamination activity. In general, such mutations may be on residues that interact with the RNA target. Examples of such mutations include S375N, S375C, S375A, and N473I, based on amino acid sequence positions of hADAR2-D, and mutations in a homologous ADAR protein corresponding to the above. In one example, the ADAR has S375N mutation. In one example, provided herein includes a mutated adenosine deaminase e.g., an adenosine deaminase comprising E488Q, V351G, S486A, T375S, S370C, P462A, N597I, L332I, I398V, K350I, M383L, D619G, S582T, V440I, S495N, K418E, S661T, and S375N (based on amino acid sequence positions of hADAR2-D, and mutations in a homologous ADAR protein corresponding to the above), fused with a dead CRISPR-Cas protein or a CRISPR-Cas nickase.

[0749] In connection with the aforementioned modified ADAR protein having C-to-U deamination activity, the invention described herein also relates to a method for deaminating a C in a target RNA sequence of interest, comprising delivering to a target RNA or DNA an AD-functionalized composition disclosed herein.

[0750] In certain example embodiments, the method for deaminating a C in a target RNA sequence comprising delivering to said target RNA: (a) a catalytically inactive (dead) Cas; (b) a guide molecule which comprises a guide sequence linked to a direct repeat sequence; and (c) a modified ADAR protein having C-to-U deamination activity or catalytic domain thereof; wherein said modified ADAR protein or catalytic domain thereof is covalently or non-covalently linked to said dead Cas protein or said guide molecule or is adapted to link thereto after delivery; wherein guide molecule forms a complex with said dead Cas protein and directs said complex to bind said target RNA sequence of interest; wherein said guide sequence is capable of hybridizing with a target sequence comprising said C to form an RNA duplex; wherein, optionally, said guide sequence comprises a non-pairing A or U at a position corresponding to said C resulting in a mismatch in the RNA duplex formed; and wherein said modified ADAR protein or catalytic domain thereof deaminates said C in said RNA duplex.

[0751] In connection with the aforementioned modified ADAR protein having C-to-U deamination activity, the invention described herein further relates to an engineered, non-naturally occurring system suitable for deaminating a C in a target locus of interest, comprising: (a) a guide molecule which comprises a guide sequence linked to a direct repeat sequence, or a nucleotide sequence encoding said guide molecule; (b) a catalytically inactive CRISPR-Cas protein, or a nucleotide sequence encoding said catalytically inactive CRISPR-Cas protein; (c) a modified ADAR protein having C-to-U deamination activity or catalytic domain thereof, or a nucleotide sequence encoding said modified ADAR protein or catalytic domain thereof; wherein said modified ADAR protein or catalytic domain thereof is covalently or non-covalently linked to said CRISPR-Cas protein or said guide molecule or is adapted to link thereto after delivery; wherein said guide sequence is capable of hybridizing with a target RNA sequence comprising a C to form an RNA duplex; wherein, optionally, said guide sequence comprises a non-pairing A or U at a position corresponding to said C resulting in a mismatch in the RNA duplex formed; wherein, optionally, the system is a vector system comprising one or more vectors comprising: (a) a first regulatory element operably linked to a nucleotide sequence encoding said guide molecule which comprises said guide sequence, (b) a second regulatory element operably linked to a nucleotide sequence encoding said catalytically inactive CRISPR-Cas protein; and (c) a nucleotide sequence encoding a modified ADAR protein having C-to-U deamination activity or catalytic domain thereof which is under control of said first or second regulatory element or operably linked to a third regulatory element; wherein, if said nucleotide sequence encoding a modified ADAR protein or catalytic domain thereof is operably linked to a third regulatory element, said modified ADAR protein or catalytic domain thereof is adapted to link to said guide molecule or said CRISPR-Cas protein after expression; wherein components (a), (b) and (c) are located on the same or different vectors of the system, optionally wherein said first, second, and/or third regulatory element is an inducible promoter.

[0752] In an embodiment of the invention, the substrate of the adenosine deaminase is an RNA/DNA heteroduplex formed upon binding of the guide molecule to its DNA target which then forms the CRISPR-Cas complex with the CRISPR-Cas enzyme. The RNA/DNA or DNA/RNA heteroduplex is also referred to herein as the “RNA/DNA hybrid”, “DNA/RNA hybrid” or “double-stranded substrate”.

[0753] According to the present invention, the substrate of the adenosine deaminase is an RNA/DNAn RNA duplex formed upon binding of the guide molecule to its DNA target which then forms the CRISPR-Cas complex with the CRISPR-Cas enzyme. The substrate of the adenosine deaminase can also be an RNA/RNA duplex formed upon binding of the guide molecule to its RNA target which then forms the CRISPR-Cas complex with the CRISPR-Cas enzyme. The RNA/DNA or DNA/RNAn RNA duplex is also referred to herein as the “RNA/DNA hybrid”, “DNA/RNA hybrid” or “double-stranded substrate”. The particular features of the guide molecule and CRISPR-Cas enzyme are detailed below.

[0754] The term “editing selectivity” as used herein refers to the fraction of all sites on a double-stranded substrate that is edited by an adenosine deaminase. Without being bound by theory, it is contemplated that editing selectivity of an adenosine deaminase is affected by the double-stranded substrate's length and secondary structures, such as the presence of mismatched bases, bulges and/or internal loops.

[0755] In some embodiments, when the substrate is a perfectly base-paired duplex longer than 50 bp, the adenosine deaminase may be able to deaminate multiple adenosine residues within the duplex (e.g., 50% of all adenosine residues). In some embodiments, when the substrate is shorter than 50 bp, the editing selectivity of an adenosine deaminase is affected by the presence of a mismatch at the target adenosine site. Particularly, in some embodiments, adenosine (A) residue having a mismatched cytidine (C) residue on the opposite strand is deaminated with high efficiency. In some embodiments, adenosine (A) residue having a mismatched guanosine (G) residue on the opposite strand is skipped without editing.

[0756] In particular embodiments, the adenosine deaminase protein or catalytic domain thereof is delivered to the cell or expressed within the cell as a separate protein, but is modified so as to be able to link to either the Cas protein or the guide molecule. In particular embodiments, this is ensured by the use of orthogonal RNA-binding protein or adaptor protein/aptamer combinations that exist within the diversity of bacteriophage coat proteins. Examples of such coat proteins include but are not limited to: MS2, Qβ, F2, GA, fr, JP501, M12, R17, BZ13, JP34, JP500, KU1, M11, MX1, TW18, VK, SP, FI, ID2, NL95, TW19, AP205, ϕCb5, ϕCb8r, ϕCb12r, ϕCb23r, 7s and PRR1. Aptamers can be naturally occurring or synthetic oligonucleotides that have been engineered through repeated rounds of in vitro selection or SELEX (systematic evolution of ligands by exponential enrichment) to bind to a specific target.

[0757] In particular embodiments, the guide molecule is provided with one or more distinct RNA loop(s) or distinct sequence(s) that can recruit an adaptor protein. A guide molecule may be extended, without colliding with the Cas protein by the insertion of distinct RNA loop(s) or distinct sequence(s) that may recruit adaptor proteins that can bind to the distinct RNA loop(s) or distinct sequence(s). Examples of modified guides and their use in recruiting effector domains to the Cas complex are provided in Konermann (Nature 2015, 517(7536): 583-588). In particular embodiments, the aptamer is a minimal hairpin aptamer which selectively binds dimerized MS2 bacteriophage coat proteins in mammalian cells and is introduced into the guide molecule, such as in the stemloop and/or in a tetraloop. In these embodiments, the adenosine deaminase protein is fused to MS2. The adenosine deaminase protein is then co-delivered together with the Cas protein and corresponding guide RNA.

[0758] In some embodiments, the Cas-ADAR base editing system described herein comprises (a) a Cas protein, which is catalytically inactive or a nickase; (b) a guide molecule which comprises a guide sequence; and (c) an adenosine deaminase protein or catalytic domain thereof; wherein the adenosine deaminase protein or catalytic domain thereof is covalently or non-covalently linked to the Cas protein or the guide molecule or is adapted to link thereto after delivery; wherein the guide sequence is substantially complementary to the target sequence but comprises a non-pairing C corresponding to the A being targeted for deamination, resulting in a A-C mismatch in a DNA-RNA or RNA-RNA duplex formed by the guide sequence and the target sequence. For application in eukaryotic cells, the Cas protein and/or the adenosine deaminase are preferably NLS-tagged.

[0759] In some embodiments, the components (a), (b) and (c) are delivered to the cell as a ribonucleoprotein complex. The ribonucleoprotein complex can be delivered via one or more lipid nanoparticles.

[0760] In some embodiments, the components (a), (b) and (c) are delivered to the cell as one or more RNA molecules, such as one or more guide RNAs and one or more mRNA molecules encoding the Cas protein, the adenosine deaminase protein, and optionally the adaptor protein. The RNA molecules can be delivered via one or more lipid nanoparticles.

[0761] In some embodiments, the components (a), (b) and (c) are delivered to the cell as one or more DNA molecules. In some embodiments, the one or more DNA molecules are comprised within one or more vectors such as viral vectors (e.g., AAV). In some embodiments, the one or more DNA molecules comprise one or more regulatory elements operably configured to express the Cas protein, the guide molecule, and the adenosine deaminase protein or catalytic domain thereof, optionally wherein the one or more regulatory elements comprise inducible promoters.

[0762] In some embodiments of the guide molecule is capable of hybridizing with a target sequence comprising the Adenine to be deaminated within a first DNA strand or a RNA strand at the target locus to form a DNA-RNA or RNA-RNA duplex which comprises a non-pairing Cytosine opposite to said Adenine. Upon duplex formation, the guide molecule forms a complex with the Cas protein and directs the complex to bind said first DNA strand or said RNA strand at the target locus of interest. Details on the aspect of the guide of the Cas-ADAR base editing system are provided herein below.

[0763] In some embodiments, a Cas guide RNA having a canonical length (e.g., about 20 nt for AacCas) is used to form a DNA-RNA or RNA-RNA duplex with the target DNA or RNA. In some embodiments, a Cas guide molecule longer than the canonical length (e.g., >20 nt for AacCas) is used to form a DNA-RNA or RNA-RNA duplex with the target DNA or RNA including outside of the Cas-guide RNA-target DNA complex. In certain example embodiments, the guide sequence has a length of about 29-53 nt capable of forming a DNA-RNA or RNA-RNA duplex with said target sequence. In certain other example embodiments, the guide sequence has a length of about 40-50 nt capable of forming a DNA-RNA or RNA-RNA duplex with said target sequence. In certain example embodiments, the distance between said non-pairing C and the 5′ end of said guide sequence is 20-30 nucleotides. In certain example embodiments, the distance between said non-pairing C and the 3′ end of said guide sequence is 20-30 nucleotides.

[0764] In at least a first design, the Cas-ADAR system comprises (a) an adenosine deaminase fused or linked to a Cas protein, wherein the Cas protein is catalytically inactive or a nickase, and (b) a guide molecule comprising a guide sequence designed to introduce a A-C mismatch in a DNA-RNA or RNA-RNA duplex formed between the guide sequence and the target sequence. In some embodiments, the Cas protein and/or the adenosine deaminase are NLS-tagged, on either the N- or C-terminus or both.

[0765] In at least a second design, the Cas-ADAR system comprises (a) a Cas protein that is catalytically inactive or a nickase, (b) a guide molecule comprising a guide sequence designed to introduce a A-C mismatch in a DNA-RNA or RNA-RNA duplex formed between the guide sequence and the target sequence, and an aptamer sequence (e.g., MS2 RNA motif or PP7 RNA motif) capable of binding to an adaptor protein (e.g., MS2 coating protein or PP7 coat protein), and (c) an adenosine deaminase fused or linked to an adaptor protein, wherein the binding of the aptamer and the adaptor protein recruits the adenosine deaminase to the DNA-RNA or RNA-RNA duplex formed between the guide sequence and the target sequence for targeted deamination at the A of the A-C mismatch. In some embodiments, the adaptor protein and/or the adenosine deaminase are NLS-tagged, on either the N- or C-terminus or both. The Cas protein can also be NLS-tagged.

[0766] The use of different aptamers and corresponding adaptor proteins also allows orthogonal gene editing to be implemented. In one example in which adenosine deaminase are used in combination with cytidine deaminase for orthogonal gene editing/deamination, sgRNA targeting different loci are modified with distinct RNA loops in order to recruit MS2-adenosine deaminase and PP7-cytidine deaminase (or PP7-adenosine deaminase and MS2-cytidine deaminase), respectively, resulting in orthogonal deamination of A or C at the target loci of interested, respectively. PP7 is the RNA-binding coat protein of the bacteriophage Pseudomonas. Like MS2, it binds a specific RNA sequence and secondary structure. The PP7 RNA-recognition motif is distinct from that of MS2. Consequently, PP7 and MS2 can be multiplexed to mediate distinct effects at different genomic loci simultaneously. For example, an sgRNA targeting locus A can be modified with MS2 loops, recruiting MS2-adenosine deaminase, while another sgRNA targeting locus B can be modified with PP7 loops, recruiting PP7-cytidine deaminase. In the same cell, orthogonal, locus-specific modifications are thus realized. This principle can be extended to incorporate other orthogonal RNA-binding proteins.

[0767] In at least a third design, the Cas-ADAR CRISPR system comprises (a) an adenosine deaminase inserted into an internal loop or unstructured region of a Cas protein, wherein the Cas protein is catalytically inactive or a nickase, and (b) a guide molecule comprising a guide sequence designed to introduce a A-C mismatch in a DNA-RNA or RNA-RNA duplex formed between the guide sequence and the target sequence.

[0768] Cas protein split sites that are suitable for insertion of adenosine deaminase can be identified with the help of a crystal structure. For example, with respect to AacCas mutants, it should be readily apparent what the corresponding position for, for example, a sequence alignment. For other Cas protein one can use the crystal structure of an ortholog if a relatively high degree of homology exists between the ortholog and the intended Cas protein.

[0769] The split position may be located within a region or loop. Preferably, the split position occurs where an interruption of the amino acid sequence does not result in the partial or full destruction of a structural feature (e.g. alpha-helixes or (3-sheets). Unstructured regions (regions that did not show up in the crystal structure because these regions are not structured enough to be “frozen” in a crystal) are often preferred options. Splits in all unstructured regions that are exposed on the surface of Cas are envisioned in the practice of the invention. The positions within the unstructured regions or outside loops may not need to be exactly the numbers provided above, but may vary by, for example 1, 2, 3, 4, 5, 6, 7, 8, 9, or even 10 amino acids either side of the position given above, depending on the size of the loop, so long as the split position still falls within an unstructured region of outside loop.

[0770] The Cas-ADAR system described herein can be used to target a specific Adenine within a DNA sequence for deamination. For example, the guide molecule can form a complex with the Cas protein and directs the complex to bind a target sequence at the target locus of interest. Because the guide sequence is designed to have a non-pairing C, the heteroduplex formed between the guide sequence and the target sequence comprises a A-C mismatch, which directs the adenosine deaminase to contact and deaminate the A opposite to the non-pairing C, converting it to a Inosine (I). Since Inosine (I) base pairs with C and functions like Gin cellular process, the targeted deamination of A described herein are useful for correction of undesirable G-A and C-T mutations, as well as for obtaining desirable A-G and T-C mutations. In some embodiments, the guide may comprise one or more mismatches to increase specificity. For example, the guide may comprise one or more disfavorable guanine mismatches across from off-target adenosines.

### Base Excision Repair Inhibitor

[0771] In some embodiments, the AD-functionalized CRISPR system further comprises a base excision repair (BER) inhibitor. Without wishing to be bound by any particular theory, cellular DNA-repair response to the presence of I:T pairing may be responsible for a decrease in nucleobase editing efficiency in cells. Alkyladenine DNA glycosylase (also known as DNA-3-methyladenine glycosylase, 3-alkyladenine DNA glycosylase, or N-methylpurine DNA glycosylase) catalyzes removal of hypoxanthine from DNA in cells, which may initiate base excision repair, with reversion of the I:T pair to a A:T pair as outcome.

[0772] In some embodiments, the BER inhibitor is an inhibitor of alkyladenine DNA glycosylase. In some embodiments, the BER inhibitor is an inhibitor of human alkyladenine DNA glycosylase. In some embodiments, the BER inhibitor is a polypeptide inhibitor. In some embodiments, the BER inhibitor is a protein that binds hypoxanthine. In some embodiments, the BER inhibitor is a protein that binds hypoxanthine in DNA. In some embodiments, the BER inhibitor is a catalytically inactive alkyladenine DNA glycosylase protein or binding domain thereof. In some embodiments, the BER inhibitor is a catalytically inactive alkyladenine DNA glycosylase protein or binding domain thereof that does not excise hypoxanthine from the DNA. Other proteins that are capable of inhibiting (e.g., sterically blocking) an alkyladenine DNA glycosylase base-excision repair enzyme are within the scope of this disclosure. Additionally, any proteins that block or inhibit base-excision repair as also within the scope of this disclosure.

[0773] Without wishing to be bound by any particular theory, base excision repair may be inhibited by molecules that bind the edited strand, block the edited base, inhibit alkyladenine DNA glycosylase, inhibit base excision repair, protect the edited base, and/or promote fixing of the non-edited strand. It is believed that the use of the BER inhibitor described herein can increase the editing efficiency of an adenosine deaminase that is capable of catalyzing a A to I change.

[0774] Accordingly, in the first design of the AD-functionalized CRISPR system discussed above, the CRISPR-Cas protein or the adenosine deaminase can be fused to or linked to a BER inhibitor (e.g., an inhibitor of alkyladenine DNA glycosylase). In some embodiments, the BER inhibitor can be comprised in one of the following structures (nCas=Cas nickase; dCas=dead Cas): [AD]-[optional linker]-[nCas/dCas]-[optional linker]-[BER inhibitor]; [AD]-[optional linker]-[BER inhibitor]-[optional linker]-[nCas/dCas]; [BER inhibitor]-[optional linker]-[AD]-[optional linker]-[nCas/dCas]; [BER inhibitor]-[optional linker]-[nCas/dCas]-[optional linker]-[AD]; [nCas/dCas]-[optional linker]-[AD]-[optional linker]-[BER inhibitor]; [nCas/dCas]-[optional linker]-[BER inhibitor]-[optional linker]-[AD].

[0775] Similarly, in the second design of the AD-functionalized CRISPR system discussed above, the CRISPR-Cas protein, the adenosine deaminase, or the adaptor protein can be fused to or linked to a BER inhibitor (e.g., an inhibitor of alkyladenine DNA glycosylase). In some embodiments, the BER inhibitor can be comprised in one of the following structures (nCas=Cas nickase; dCas=dead Cas): [nCas/dCas]-[optional linker]-[BER inhibitor]; [BER inhibitor]-[optional linker]-[nCas/dCas]; [AD]-[optional linker]-[Adaptor]-[optional linker]-[BER inhibitor]; [AD]-[optional linker]-[BER inhibitor]-[optional linker]-[Adaptor]; [BER inhibitor]-[optional linker]-[AD]-[optional linker]-[Adaptor]; [BER inhibitor]-[optional linker]-[Adaptor]-[optional linker]-[AD]; [Adaptor]-[optional linker]-[AD]-[optional linker]-[BER inhibitor]; [Adaptor]-[optional linker]-[BER inhibitor]-[optional linker]-[AD].

[0776] In the third design of the AD-functionalized CRISPR system discussed above, the BER inhibitor can be inserted into an internal loop or unstructured region of a CRISPR-Cas protein.

### Cytidine Deaminase

[0777] In some embodiments, the deaminase is a cytidine deaminase. The term “cytidine deaminase” or “cytidine deaminase protein” or “cytidine deaminase activity” as used herein refers to a protein, a polypeptide, or one or more functional domain(s) of a protein or a polypeptide that is capable of catalyzing a hydrolytic deamination reaction that converts an cytosine (or an cytosine moiety of a molecule) to an uracil (or a uracil moiety of a molecule), as shown below. In some embodiments, the cytosine-containing molecule is an cytidine (C), and the uracil-containing molecule is an uridine (U). The cytosine-containing molecule can be deoxyribonucleic acid (DNA) or ribonucleic acid (RNA). In certain examples, a cytidine deaminase may be a cytidine deaminase acting on RNA (CDAR).

[chemical structure]

[0778] According to the present disclosure, cytidine deaminases that can be used in connection with the present disclosure include, but are not limited to, members of the enzyme family known as apolipoprotein B mRNA-editing complex (APOBEC) family deaminase, an activation-induced deaminase (AID), or a cytidine deaminase 1 (CDA1). In particular embodiments, the deaminase in an APOBEC1 deaminase, an APOBEC2 deaminase, an APOBEC3A deaminase, an APOBEC3B deaminase, an APOBEC3C deaminase, and APOBEC3D deaminase, an APOBEC3E deaminase, an APOBEC3F deaminase an APOBEC3G deaminase, an APOBEC3H deaminase, or an APOBEC4 deaminase.

[0779] In the methods and systems of the present invention, the cytidine deaminase or engineered adenosine deaminase with cytidine deaminase activity is capable of targeting Cytosine in a DNA single strand. In certain example embodiments the cytidine deaminase activity may edit on a single strand present outside of the binding component e.g. bound CRISPR-Cas. In other example embodiments, the cytidine deaminase may edit at a localized bubble, such as a localized bubble formed by a mismatch at the target edit site but the guide sequence. In certain example embodiments the cytidine deaminase may contain mutations that help focus the area of activity such as those disclosed in Kim et al., Nature Biotechnology (2017) 35(4):371-377 (doi:10.1038/nbt.3803.

[0780] In some embodiments, the cytidine deaminase is derived from one or more metazoa species, including but not limited to, mammals, birds, frogs, squids, fish, flies and worms. In some embodiments, the cytidine deaminase is a human, primate, cow, dog rat or mouse cytidine deaminase.

[0781] In some embodiments, the cytidine deaminase is a human APOBEC, including hAPOBEC1 or hAPOBEC3. In some embodiments, the cytidine deaminase is a human AID.

[0782] In some embodiments, the cytidine deaminase protein recognizes and converts one or more target cytosine residue(s) in a single-stranded bubble of a RNA duplex into uracil residues (s). In some embodiments, the cytidine deaminase protein recognizes a binding window on the single-stranded bubble of a RNA duplex. In some embodiments, the binding window contains at least one target cytosine residue(s). In some embodiments, the binding window is in the range of about 3 bp to about 100 bp. In some embodiments, the binding window is in the range of about 5 bp to about 50 bp. In some embodiments, the binding window is in the range of about 10 bp to about 30 bp. In some embodiments, the binding window is about 1 bp, 2 bp, 3 bp, 5 bp, 7 bp, 10 bp, 15 bp, 20 bp, 25 bp, 30 bp, 40 bp, 45 bp, 50 bp, 55 bp, 60 bp, 65 bp, 70 bp, 75 bp, 80 bp, 85 bp, 90 bp, 95 bp, or 100 bp.

[0783] In some embodiments, the cytidine deaminase protein comprises one or more deaminase domains. Not intended to be bound by theory, it is contemplated that the deaminase domain functions to recognize and convert one or more target cytosine (C) residue(s) contained in a single-stranded bubble of a RNA duplex into (an) uracil (U) residue (s). In some embodiments, the deaminase domain comprises an active center. In some embodiments, the active center comprises a zinc ion. In some embodiments, amino acid residues in or near the active center interact with one or more nucleotide(s) 5′ to a target cytosine residue. In some embodiments, amino acid residues in or near the active center interact with one or more nucleotide(s) 3′ to a target cytosine residue.

[0784] In some embodiments, the cytidine deaminase comprises human APOBEC1 full protein (hAPOBEC1) or the deaminase domain thereof (hAPOBEC1-D) or a C-terminally truncated version thereof (hAPOBEC-T). In some embodiments, the cytidine deaminase is an APOBEC family member that is homologous to hAPOBEC1, hAPOBEC-D or hAPOBEC-T.

[0785] In some embodiments, the cytidine deaminase comprises human AID1 full protein (hAID) or the deaminase domain thereof (hAID-D) or a C-terminally truncated version thereof (hAID-T). In some embodiments, the cytidine deaminase is an AID family member that is homologous to hAID, hAID-D or hAID-T. In some embodiments, the hAID-T is a hAID which is C-terminally truncated by about 20 amino acids.

[0786] In some embodiments, the cytidine deaminase comprises the wild-type amino acid sequence of a cytosine deaminase. In some embodiments, the cytidine deaminase comprises one or more mutations in the cytosine deaminase sequence, such that the editing efficiency, and/or substrate editing preference of the cytosine deaminase is changed according to specific needs.

[0787] Certain mutations of APOBEC1 and APOBEC3 proteins have been described in Kim et al., Nature Biotechnology (2017) 35(4):371-377 (doi:10.1038/nbt.3803); and Harris et al. Mol. Cell (2002) 10:1247-1253, each of which is incorporated herein by reference in its entirety.

[0788] In some embodiments, the cytidine deaminase is an APOBEC1 deaminase comprising one or more mutations at amino acid positions corresponding to W90, R118, H121, H122, R126, or R132 in rat APOBEC1, or an APOBEC3G deaminase comprising one or more mutations at amino acid positions corresponding to W285, R313, D316, D317X, R320, or R326 in human APOBEC3G.

[0789] In some embodiments, the cytidine deaminase comprises a mutation at tryptophane90 of the rat APOBEC1 amino acid sequence, or a corresponding position in a homologous APOBEC protein, such as tryptophane285 of APOBEC3G. In some embodiments, the tryptophan residue at position 90 is replaced by an tyrosine or phenylalanine residue (W90Y or W90F).

[0790] In some embodiments, the cytidine deaminase comprises a mutation at Arginine118 of the rat APOBEC1 amino acid sequence, or a corresponding position in a homologous APOBEC protein. In some embodiments, the arginine residue at position 118 is replaced by an alanine residue (R118A).

[0791] In some embodiments, the cytidine deaminase comprises a mutation at Histidine121 of the rat APOBEC1 amino acid sequence, or a corresponding position in a homologous APOBEC protein. In some embodiments, the histidine residue at position 121 is replaced by an arginine residue (H121R).

[0792] In some embodiments, the cytidine deaminase comprises a mutation at Histidine122 of the rat APOBEC1 amino acid sequence, or a corresponding position in a homologous APOBEC protein. In some embodiments, the histidine residue at position 122 is replaced by an arginine residue (H122R).

[0793] In some embodiments, the cytidine deaminase comprises a mutation at Arginine126 of the rat APOBEC1 amino acid sequence, or a corresponding position in a homologous APOBEC protein, such as Arginine320 of APOBEC3G. In some embodiments, the arginine residue at position 126 is replaced by an alanine residue (R126A) or by a glutamic acid (R126E).

[0794] In some embodiments, the cytidine deaminase comprises a mutation at arginine132 of the APOBEC1 amino acid sequence, or a corresponding position in a homologous APOBEC protein. In some embodiments, the arginine residue at position 132 is replaced by a glutamic acid residue (R132E).

[0795] In some embodiments, to narrow the width of the editing window, the cytidine deaminase may comprise one or more of the mutations: W90Y, W90F, R126E and R132E, based on amino acid sequence positions of rat APOBEC1, and mutations in a homologous APOBEC protein corresponding to the above.

[0796] In some embodiments, to reduce editing efficiency, the cytidine deaminase may comprise one or more of the mutations: W90A, R118A, R132E, based on amino acid sequence positions of rat APOBEC1, and mutations in a homologous APOBEC protein corresponding to the above. In particular embodiments, it can be of interest to use a cytidine deaminase enzyme with reduced efficacy to reduce off-target effects.

[0797] In some embodiments, the cytidine deaminase is wild-type rat APOBEC1 (rAPOBEC1, or a catalytic domain thereof. In some embodiments, the cytidine deaminase comprises one or more mutations in the rAPOBEC1 sequence, such that the editing efficiency, and/or substrate editing preference of rAPOBEC1 is changed according to specific needs.

rAPOBEC1:
(SEQ ID NO: 243)
[sequence omitted]

[0798] In some embodiments, the cytidine deaminase is wild-type human APOBEC1 (hAPOBEC1) or a catalytic domain thereof. In some embodiments, the cytidine deaminase comprises one or more mutations in the hAPOBEC1 sequence, such that the editing efficiency, and/or substrate editing preference of hAPOBEC1 is changed according to specific needs.

APOBEC1:
(SEQ ID NO: 244)
MTSEKGPSTGDPTLRRRIEPWEFDVFYDPRELRKEACLLYEIKWGMSRKI
WRSSGKNTTNHVEVNFIKKFTSERDFHPSMSCSITWFLSWSPCWECSQAI
REFLSRHPGVTLVIYVARLFWHMDQQNRQGLRDLVNSGVTIQIMRASEYY
HCWRNFVNYPPGDEAHWPQYPPLWMMLYALELHCIILSLPPCLKISRRWQ
NHLTFFRLHLQNCHYQTIPPHILLATGLIHPSVAWR

[0799] In some embodiments, the cytidine deaminase is wild-type human APOBEC3G (hAPOBEC3G) or a catalytic domain thereof. In some embodiments, the cytidine deaminase comprises one or more mutations in the hAPOBEC3G sequence, such that the editing efficiency, and/or substrate editing preference of hAPOBEC3G is changed according to specific needs.

hAPOBEC3G:
(SEQ ID NO: 245)
MELKYHPEMRFFHWFSKWRKLHRDQEYEVTWYISWSPCTKCTRDMATFLA
EDPKVTLTIFVARLYYFWDPDYQEALRSLCQKRDGPRATMKIMNYDEFQH
CWSKFVYSQRELEEPWNNLPKYYILLHIMLGEILRHSMDPPTFTENENNE
PWVRGRHETYLCYEVERMHNDTWVLLNQRRGELCNQAPHKHGELEGRHAE
LCFLDVIPFWKLDLDQDYRVTCFTSWSPCFSCAQEMAKFISKNKHVSLCI
FTARIYDDQGRCQEGLRTLAEAGAKISIMTYSEFKHCWDTFVDHQGCPFQ
PWDGLDEHSQDLSGRLRAILQNQEN

[0800] In some embodiments, the cytidine deaminase is wild-type Petromyzon marinus CDA1 (pmCDA1) or a catalytic domain thereof. In some embodiments, the cytidine deaminase comprises one or more mutations in the pmCDA1 sequence, such that the editing efficiency, and/or substrate editing preference of pmCDA1 is changed according to specific needs.

pmCDA1:
(SEQ ID NO: 246)
MTDAEYVRIHEKLDIYTFKKQFFNNKKSVSHRCYVLFELKRRGERRACFW
GYAVNKPQSGTERGIHAEIFSIRKVEEYLRDNPGQFTINWYSSWSPCADC
AEKILEWYNQELRGNGHTLKIWACKLYYEKNARNQIGLWNLRDNGVGLNV
MVSEHYQCCRKIFIQSSHNQLNENRWLEKTLKRAEKRRSELSIMIQVKIL
HTTKSPAV

[0801] In some embodiments, the cytidine deaminase is wild-type human AID (hAID) or a catalytic domain thereof. In some embodiments, the cytidine deaminase comprises one or more mutations in the pmCDA1 sequence, such that the editing efficiency, and/or substrate editing preference of pmCDA1 is changed according to specific needs.

hAID:
(SEQ ID NO: 247)
MDSLLMNRRKFLYQFKNVRWAKGRRETYLCYVVKRRDSATSFSLDFGYLR
NKNGCHVELLFLRYISDWDLDPGRCYRVTWFTSWSPCYDCARHVADFLRG
NPYLSLRIFTARLYFCEDRKAEPEGLRRLHRAGVQIAIMTFKDYFYCWNT
FVENHERTFKAWEGLHENSVRLSRQLRRILLPLYEVDDLRDAFRTLGLLD

[0802] In some embodiments, the cytidine deaminase is truncated version of hAID (hAID-DC) or a catalytic domain thereof. In some embodiments, the cytidine deaminase comprises one or more mutations in the hAID-DC sequence, such that the editing efficiency, and/or substrate editing preference of hAID-DC is changed according to specific needs.

hAID-DC:
(SEQ ID NO: 248)
MDSLLMNRRKFLYQFKNVRWAKGRRETYLCYVVKRRDSATSFSLDFGYLR
NKNGCHVELLFLRYISDWDLDPGRCYRVTWFTSWSPCYDCARHVADFLRG
NPNLSLRIFTARLYFCEDRKAEPEGLRRLHRAGVQIAIMTFKDYFYCWNT
FVENHERTFKAWEGLHENSVRLSRQLRRILL

[0803] Additional embodiments of the cytidine deaminase are disclosed in WO WO2017/070632, titled “Nucleobase Editor and Uses Thereof,” which is incorporated herein by reference in its entirety.

[0804] In some embodiments, the cytidine deaminase has an efficient deamination window that encloses the nucleotides susceptible to deamination editing. Accordingly, in some embodiments, the “editing window width” refers to the number of nucleotide positions at a given target site for which editing efficiency of the cytidine deaminase exceeds the half-maximal value for that target site. In some embodiments, the cytidine deaminase has an editing window width in the range of about 1 to about 6 nucleotides. In some embodiments, the editing window width of the cytidine deaminase is 1, 2, 3, 4, 5, or 6 nucleotides.

[0805] Not intended to be bound by theory, it is contemplated that in some embodiments, the length of the linker sequence affects the editing window width. In some embodiments, the editing window width increases (e.g., from about 3 to about 6 nucleotides) as the linker length extends (e.g., from about 3 to about 21 amino acids). In a non-limiting example, a 16-residue linker offers an efficient deamination window of about 5 nucleotides. In some embodiments, the length of the guide RNA affects the editing window width. In some embodiments, shortening the guide RNA leads to a narrowed efficient deamination window of the cytidine deaminase.

[0806] In some embodiments, mutations to the cytidine deaminase affect the editing window width. In some embodiments, the cytidine deaminase component of the CD-functionalized CRISPR system comprises one or more mutations that reduce the catalytic efficiency of the cytidine deaminase, such that the deaminase is prevented from deamination of multiple cytidines per DNA binding event. In some embodiments, tryptophan at residue 90 (W90) of APOBEC1 or a corresponding tryptophan residue in a homologous sequence is mutated. In some embodiments, the catalytically inactive CRISPR-Cas is fused to or linked to an APOBEC1 mutant that comprises a W90Y or W90F mutation. In some embodiments, tryptophan at residue 285 (W285) of APOBEC3G, or a corresponding tryptophan residue in a homologous sequence is mutated. In some embodiments, the catalytically inactive CRISPR-Cas is fused to or linked to an APOBEC3G mutant that comprises a W285Y or W285F mutation.

[0807] In some embodiments, the cytidine deaminase component of CD-functionalized CRISPR system comprises one or more mutations that reduce tolerance for non-optimal presentation of a cytidine to the deaminase active site. In some embodiments, the cytidine deaminase comprises one or more mutations that alter substrate binding activity of the deaminase active site. In some embodiments, the cytidine deaminase comprises one or more mutations that alter the conformation of DNA to be recognized and bound by the deaminase active site. In some embodiments, the cytidine deaminase comprises one or more mutations that alter the substrate accessibility to the deaminase active site. In some embodiments, arginine at residue 126 (R126) of APOBEC1 or a corresponding arginine residue in a homologous sequence is mutated. In some embodiments, the catalytically inactive CRISPR-Cas is fused to or linked to an APOBEC1 that comprises a R126A or R126E mutation. In some embodiments, tryptophan at residue 320 (R320) of APOBEC3G, or a corresponding arginine residue in a homologous sequence is mutated. In some embodiments, the catalytically inactive CRISPR-Cas is fused to or linked to an APOBEC3G mutant that comprises a R320A or R320E mutation. In some embodiments, arginine at residue 132 (R132) of APOBEC1 or a corresponding arginine residue in a homologous sequence is mutated. In some embodiments, the catalytically inactive CRISPR-Cas is fused to or linked to an APOBEC1 mutant that comprises a R132E mutation.

[0808] In some embodiments, the APOBEC1 domain of the CD-functionalized CRISPR system comprises one, two, or three mutations selected from W90Y, W90F, R126A, R126E, and R132E. In some embodiments, the APOBEC1 domain comprises double mutations of W90Y and R126E. In some embodiments, the APOBEC1 domain comprises double mutations of W90Y and R132E. In some embodiments, the APOBEC1 domain comprises double mutations of R126E and R132E. In some embodiments, the APOBEC1 domain comprises three mutations of W90Y, R126E and R132E.

[0809] In some embodiments, one or more mutations in the cytidine deaminase as disclosed herein reduce the editing window width to about 2 nucleotides. In some embodiments, one or more mutations in the cytidine deaminase as disclosed herein reduce the editing window width to about 1 nucleotide. In some embodiments, one or more mutations in the cytidine deaminase as disclosed herein reduce the editing window width while only minimally or modestly affecting the editing efficiency of the enzyme. In some embodiments, one or more mutations in the cytidine deaminase as disclosed herein reduce the editing window width without reducing the editing efficiency of the enzyme. In some embodiments, one or more mutations in the cytidine deaminase as disclosed herein enable discrimination of neighboring cytidine nucleotides, which would be otherwise edited with similar efficiency by the cytidine deaminase.

[0810] In some embodiments, the cytidine deaminase protein further comprises or is connected to one or more double-stranded RNA (dsRNA) binding motifs (dsRBMs) or domains (dsRBDs) for recognizing and binding to double-stranded nucleic acid substrates. In some embodiments, the interaction between the cytidine deaminase and the substrate is mediated by one or more additional protein factor(s), including a CRISPR/CAS protein factor. In some embodiments, the interaction between the cytidine deaminase and the substrate is further mediated by one or more nucleic acid component(s), including a guide RNA.

[0811] According to the present invention, the substrate of the cytidine deaminase is an DNA single strand bubble of a RNA duplex comprising a Cytosine of interest, made accessible to the cytidine deaminase upon binding of the guide molecule to its DNA target which then forms the CRISPR-Cas complex with the CRISPR-Cas enzyme, whereby the cytosine deaminase is fused to or is capable of binding to one or more components of the CRISPR-Cas complex, i.e. the CRISPR-Cas enzyme and/or the guide molecule. The particular features of the guide molecule and CRISPR-Cas enzyme are detailed below.

[0812] The cytidine deaminase or catalytic domain thereof may be a human, a rat, or a lamprey cytidine deaminase protein or catalytic domain thereof.

[0813] The cytidine deaminase protein or catalytic domain thereof may be an apolipoprotein B mRNA-editing complex (APOBEC) family deaminase. The cytidine deaminase protein or catalytic domain thereof may be an activation-induced deaminase (AID). The cytidine deaminase protein or catalytic domain thereof may be a cytidine deaminase 1 (CDA1).

[0814] The cytidine deaminase protein or catalytic domain thereof may be an APOBEC1 deaminase. The APOBEC1 deaminase may comprise one or more mutations corresponding to W90A, W90Y, R118A, H121R, H122R, R126A, R126E, or R132E in rat APOBEC1, or an APOBEC3G deaminase comprising one or more mutations corresponding to W285A, W285Y, R313A, D316R, D317R, R320A, R320E, or R326E in human APOBEC3G.

[0815] The system may further comprise a uracil glycosylase inhibitor (UGI). Inn some embodiments, the cytidine deaminase protein or catalytic domain thereof is delivered together with a uracil glycosylase inhibitor (UGI). The GI may be linked (e.g., covalently linked) to the cytidine deaminase protein or catalytic domain thereof and/or a catalytically inactive CRISPR-Cas protein.

[0816] Regulation of Post-Translational Modification of Gene Products

[0817] In some cases, base editing may be used for regulating post-translational modification of a gene products. In some cases, an amino acid residue that is a post-translational modification site may be mutated by base editing to an amino residue that cannot be modified. Examples of such post-translational modifications include disulfide bond formation, glycosylation, lipidation, acetylation, phosphorylation, methylation, ubiquitination, sumoylation, or any combinations thereof.

[0818] In some embodiments, the base editors herein may regulate Stat3/IRF-5 pathway, e.g., for reduction of inflammation. For example, phosphorylation on Tyr705 of Stat3, Thr10, Ser158, Ser309, Ser317, Ser451, and/or Ser462 of IRF-5 may be involved with interleukin signaling. Base editors herein may be used to mutate one or more of these procreation sites for regulating immunity, autoimmunity, and/or inflammation.

[0819] In some embodiments, the base editors herein may regulate insulin receptor substrate (IRS) pathway. For example, phosphorylation on Ser265, Ser302, Ser325, Ser336, Ser358, Ser407, and/or Ser408 may be involved in regulating (e.g., inhibit) ISR pathway. Alternatively or additionally, Serine 307 in mouse (or Serine 312 in human) may be mutated so the phosphorylation may be regulated. For example, Serine 307 phosphorylation may lead to degradation of IRS-1 and reduce MAPK signaling. Serine 307 phosphorylation may be induced under insulin insensitivity conditions, such as insulin overstimulation and/or TNFα treatment. In some examples, 5307F mutation may be generated for stabilizing the interaction between IRS-1 and other components in the pathway. Base editors herein may be used to mutate one or more of these procreation sites for regulating IRS pathway.

### Regulation of Stability of Gene Products

[0820] In some embodiments, base editing may be used for regulating the stability of gene products. For example, one or more amino acid residues that regulate protein degradation rates may be mutated by the base editors herein. In some cases, such amino acid residues may be in a degron. A degron may refer to a portion of a protein involved in regulating the degradation rate of the protein. Degrons may include short amino acid sequences, structural motifs, and exposed amino acids (e.g., lysine or arginine). Some protein may comprise multiple degrons. The degrons be ubiquitin-dependent (e.g., regulating protein degradation based on ubiquitination of the protein) or ubiquitin-independent.

[0821] In some cases, the based editing may be used to mutate one or more amino acid residues in a signal peptide for protein degradation. In some examples, the signal peptide may be a PEST sequence, which is a peptide sequence that is rich in proline (P), glutamic acid (E), serine (S), and threonine (T). For example, the stability of NANOG, which comprises a PEST sequence, may be increased, e.g., to promote embryonic stem cell pluripotency.

[0822] In some examples, the base editors may be used for mutating SMN2 (e.g., to generate S270A mutilation) to increase stability of the SMN2 protein, which is involved in spinal muscular atrophy. Other mutations in SMN2 that may be generated by based editors include those described in Cho S. et al., Genes Dev. 2010 Mar. 1; 24(5): 438-442. In certain examples, the base editors may be used for generating mutations on IκBα, as described in Fortmann K T et al., J Mol Biol. 2015 Aug. 28; 427(17): 2748-2756. Target sites in degrons may be identified by computational tools, e.g., the online tools provided on slim.ucd.ie/apc/index.php. Other targets include Cdc25A phosphatase.

Examples of Genes that can be Targeted by Base Editors

[0823] In some examples, the base editors may be used for modifying PCSK9. The base editors may introduce stop codons and/or disease-associated mutations that reduce PCSK9 activity. The base editing may introduce one or more of the following mutations in PCSK9: R46L, R46A, A53V, A53A, E57K, Y142X, L253F, R237W, H391N, N425S, A443T, I474V, I474A, Q554E, Q619P, E670G, E670A, C679X, H417Q, R469W, E482G, F515L, and/or H553R.

[0824] In some examples, the base editors may be used for modifying ApoE. The base editors may target ApoE in synthetic model and/or patient-derived neurons (e.g., those derived from iPSC). The targeting may be tested by sequencing.

[0825] In some examples, the base editors may be used for modifying Stat1/3. The base editor may target Y705 and/or S727 for reducing Stat1/3 activation. The base editing may be tested by luciferase-based promoter. Targeting Stat1/3 by base editing may block monocyte to macrophage differentiation, and inflammation in response to ox-LDL stimulation of macrophages.

[0826] In some examples, the base editors may be used for modifying TFEB (transcription factor for EB). The base editor may target one or more amino acid residues that regulate translocation of the TFEB. In some cases, the base editor may target one or more amino acid residues that regulate autophagy.

[0827] In some examples, the base editors may be used for modifying ornithine carbamoyl transferase (OTC). Such modification may be used for correct ornithine carbamoyl transferase deficiency. For example, base editing may correct Leu45Pro mutation by converting nucleotide 134C to U. An example approach is shown in FIG. 102.

[0828] In some examples, the base editors may be used for modifying Lipin1. The base editor may target one or more serine's that can be phosphorylated by mTOR. Base editing of Lipin1 may regulate lipid accumulation. The base editors may target Lipin1 in 3T3L1 preadipocyte model. Effects of the base editing may be tested by measuring reduction of lipid accumulation (e.g., via oil red).

### Base Editing Guide Molecule Design Considerations

[0829] In some embodiments, the guide sequence is an RNA sequence of between 10 to 50 nt in length, but more particularly of about 20-30 nt advantageously about 20 nt, 23-25 nt or 24 nt. In base editing embodiments, the guide sequence is selected so as to ensure that it hybridizes to the target sequence comprising the adenosine to be deaminated. This is described more in detail below. Selection can encompass further steps which increase efficacy and specificity of deamination.

[0830] In some embodiments, the guide sequence is about 20 nt to about 30 nt long and hybridizes to the target DNA strand to form an almost perfectly matched duplex, except for having a dA-C mismatch at the target adenosine site. Particularly, in some embodiments, the dA-C mismatch is located close to the center of the target sequence (and thus the center of the duplex upon hybridization of the guide sequence to the target sequence), thereby restricting the adenosine deaminase to a narrow editing window (e.g., about 4 bp wide). In some embodiments, the target sequence may comprise more than one target adenosine to be deaminated. In further embodiments the target sequence may further comprise one or more dA-C mismatch 3′ to the target adenosine site. In some embodiments, to avoid off-target editing at an unintended Adenine site in the target sequence, the guide sequence can be designed to comprise a non-pairing Guanine at a position corresponding to said unintended Adenine to introduce a dA-G mismatch, which is catalytically unfavorable for certain adenosine deaminases such as ADAR1 and ADAR2. See Wong et al., RNA 7:846-858 (2001), which is incorporated herein by reference in its entirety.

[0831] In some embodiments, a CRISPR-Cas guide sequence having a canonical length (e.g., about 20 nt) is used to form a heteroduplex with the target DNA. In some embodiments, a CRISPR-Cas guide molecule longer than the canonical length (e.g., >20 nt) is used to form a heteroduplex with the target DNA including outside of the CRISPR-Cas-guide RNA-target DNA complex. This can be of interest where deamination of more than one adenine within a given stretch of nucleotides is of interest. In alternative embodiments, it is of interest to maintain the limitation of the canonical guide sequence length. In some embodiments, the guide sequence is designed to introduce a dA-C mismatch outside of the canonical length of CRISPR-Cas guide, which may decrease steric hindrance by CRISPR-Cas and increase the frequency of contact between the adenosine deaminase and the dA-C mismatch.

[0832] In some base editing embodiments, the position of the mismatched nucleobase (e.g., cytidine) is calculated from where the PAM would be on a DNA target. In some embodiments, the mismatched nucleobase is positioned 12-21 nt from the PAM, or 13-21 nt from the PAM, or 14-21 nt from the PAM, or 14-20 nt from the PAM, or 15-20 nt from the PAM, or 16-20 nt from the PAM, or 14-19 nt from the PAM, or 15-19 nt from the PAM, or 16-19 nt from the PAM, or 17-19 nt from the PAM, or about 20 nt from the PAM, or about 19 nt from the PAM, or about 18 nt from the PAM, or about 17 nt from the PAM, or about 16 nt from the PAM, or about 15 nt from the PAM, or about 14 nt from the PAM. In a preferred embodiment, the mismatched nucleobase is positioned 17-19 nt or 18 nt from the PAM.

[0833] Mismatch distance is the number of bases between the 3′ end of the CRISPR-Cas spacer and the mismatched nucleobase (e.g., cytidine), wherein the mismatched base is included as part of the mismatch distance calculation. In some embodiment, the mismatch distance is 1-10 nt, or 1-9 nt, or 1-8 nt, or 2-8 nt, or 2-7 nt, or 2-6 nt, or 3-8 nt, or 3-7 nt, or 3-6 nt, or 3-5 nt, or about 2 nt, or about 3 nt, or about 4 nt, or about 5 nt, or about 6 nt, or about 7 nt, or about 8 nt. In a preferred embodiment, the mismatch distance is 3-5 nt or 4 nt.

[0834] In some embodiment, the editing window of a CRISPR-Cas-ADAR system described herein is 12-21 nt from the PAM, or 13-21 nt from the PAM, or 14-21 nt from the PAM, or 14-20 nt from the PAM, or 15-20 nt from the PAM, or 16-20 nt from the PAM, or 14-19 nt from the PAM, or 15-19 nt from the PAM, or 16-19 nt from the PAM, or 17-19 nt from the PAM, or about 20 nt from the PAM, or about 19 nt from the PAM, or about 18 nt from the PAM, or about 17 nt from the PAM, or about 16 nt from the PAM, or about 15 nt from the PAM, or about 14 nt from the PAM. In some embodiment, the editing window of the CRISPR-Cas-ADAR system described herein is 1-10 nt from the 3′ end of the CRISPR-Cas spacer, or 1-9 nt from the 3′ end of the CRISPR-Cas spacer, or 1-8 nt from the 3′ end of the CRISPR-Cas spacer, or 2-8 nt from the 3′ end of the CRISPR-Cas spacer, or 2-7 nt from the 3′ end of the CRISPR-Cas spacer, or 2-6 nt from the 3′ end of the CRISPR-Cas spacer, or 3-8 nt from the 3′ end of the CRISPR-Cas spacer, or 3-7 nt from the 3′ end of the CRISPR-Cas spacer, or 3-6 nt from the 3′ end of the CRISPR-Cas spacer, or 3-5 nt from the 3′ end of the CRISPR-Cas spacer, or about 2 nt from the 3′ end of the CRISPR-Cas spacer, or about 3 nt from the 3′ end of the CRISPR-Cas spacer, or about 4 nt from the 3′ end of the CRISPR-Cas spacer, or about 5 nt from the 3′ end of the CRISPR-Cas spacer, or about 6 nt from the 3′ end of the CRISPR-Cas spacer, or about 7 nt from the 3′ end of the CRISPR-Cas spacer, or about 8 nt from the 3′ end of the CRISPR-Cas spacer.

### Linkers

[0835] The deaminase herein may be fused to a Cas protein via a linker. It is further envisaged that RNA adenosine methylase (N(6)-methyladenosine) can be fused to the RNA targeting effector proteins of the invention and targeted to a transcript of interest. This methylase causes reversible methylation, has regulatory roles and may affect gene expression and cell fate decisions by modulating multiple RNA-related cellular pathways (Fu et al Nat Rev Genet. 2014; 15(5):293-306).

[0836] ADAR or other RNA modification enzymes may be linked (e.g., fused) to CRISPR-Cas or a dead CRISPR-Cas protein via a linker, e.g., to the C terminus or the N-terminus of CRISPR-Cas or dead CRISPR-Cas.

[0837] The term “linker” as used in reference to a fusion protein refers to a molecule which joins the proteins to form a fusion protein. Generally, such molecules have no specific biological activity other than to join or to preserve some minimum distance or other spatial relationship between the proteins. However, in certain embodiments, the linker may be selected to influence some property of the linker and/or the fusion protein such as the folding, net charge, or hydrophobicity of the linker.

[0838] Suitable linkers for use in the methods of the present invention are well known to those of skill in the art and include, but are not limited to, straight or branched-chain carbon linkers, heterocyclic carbon linkers, or peptide linkers. However, as used herein the linker may also be a covalent bond (carbon-carbon bond or carbon-heteroatom bond). In particular embodiments, the linker is used to separate the CRISPR-Cas protein and the nucleotide deaminase by a distance sufficient to ensure that each protein retains its required functional property. Preferred peptide linker sequences adopt a flexible extended conformation and do not exhibit a propensity for developing an ordered secondary structure. In certain embodiments, the linker can be a chemical moiety which can be monomeric, dimeric, multimeric or polymeric. Preferably, the linker comprises amino acids. Typical amino acids in flexible linkers include Gly, Asn and Ser. Accordingly, in particular embodiments, the linker comprises a combination of one or more of Gly, Asn and Ser amino acids. Other near neutral amino acids, such as Thr and Ala, also may be used in the linker sequence. Exemplary linkers are disclosed in Maratea et al. (1985), Gene 40: 39-46; Murphy et al. (1986) Proc. Nat'l. Acad. Sci. USA 83: 8258-62; U.S. Pat. Nos. 4,935,233; and 4,751,180. For example, GlySer linkers GGS, GGGS or GSG can be used. GGS, GSG, GGGS or GGGGS linkers can be used in repeats of 3 (such as (GGS)₃ (SEQ ID No. 249), (GGGGS)₃ (SEQ ID NO:79)) or 5, 6, 7, 9 or even 12 (SEQ ID NO:250-254) or more, to provide suitable lengths. In some cases, the linker may be (GGGGS)₃₋₁₅, For example, in some cases, the linker may be (GGGGS)₃₋₁₁, e.g., GGGGS (SEQ ID NO:255), (GGGGS)₂ (SEQ ID NO:256), (GGGGS)₃ (SEQ ID NO:79), (GGGGS)₄ (SEQ ID NO:257), (GGGGS)₅, (GGGGS)₆ (SEQ ID NO:251), (GGGGS)₇ (SEQ ID NO:252), (GGGGS)₈ (SEQ ID NO:258), (GGGGS)₉ (SEQ ID NO:253), (GGGGS)₁₀ (SEQ ID NO:259), or (GGGGS)₁₁ (SEQ ID NO:260).

[0839] In particular embodiments, linkers such as (GGGGS)₃ are preferably used herein. (GGGGS)₆ (GGGGS)₉ or (GGGGS)₁₂ may preferably be used as alternatives. Other preferred alternatives are (GGGGS)₁ (SEQ ID No 255), (GGGGS)₂ (SEQ ID No. 256), (GGGGS)₄, (GGGGS)₅, (GGGGS)₇, (GGGGS)₈, (GGGGS)₁₀, or (GGGGS)₁₁. In yet a further embodiment, LEPGEKPYKCPECGKSFSQSGALTRHQRTHTR (SEQ ID No:261) is used as a linker. In yet an additional embodiment, the linker is an XTEN linker. In particular embodiments, the CRISPR-cas protein is a CRISPR-Cas protein and is linked to the deaminase protein or its catalytic domain by means of an LEPGEKPYKCPECGKSFSQSGALTRHQRTHTR (SEQ ID No:261) linker. In further particular embodiments, the CRISPR-Cas protein is linked C-terminally to the N-terminus of a deaminase protein or its catalytic domain by means of an LEPGEKPYKCPECGKSFSQSGALTRHQRTHTR (SEQ ID No:261) linker. In addition, N- and C-terminal NLSs can also function as linker (e.g., PKKKRKVEASSPKKRKVEAS (SEQ ID No. 262)).

[0840] Examples of linkers are shown in the Table 8 below.

TABLE 8

| | |
|---|---|
| GGS | GGTGGTAGT (SEQ ID NO: 263) |
| GGSx3 (9) | GGTGGTAGTGGAGGGAGCGGCGGTTCA |
| | (SEQ ID NO: 264) |
| GGSx7 (21) | ggtggaggaggctctggtggaggcggtagcggaggcgg |
| | agggtcgGGTGGTAGTGGAGGGAGCGGCGGTTCA |
| | (SEQ ID NO: 265) |
| XTEN | TCGGGATCTGAGACGCCTGGGACCTCGGAATCGGCTAC |
| | GCCCGAAAGT (SEQ ID NO: 266) |
| Z- | Gtggataacaaatttaacaaagaaatgtgggcggcgtg |
| EGFR_Short | ggaagaaattcgtaacctgccgaacctgaacggctggc |
| | agatgaccgcgtttattgcgagcctggtggatgatccg |
| | agccagagcgcgaacctgctggcggaagcgaaaaaact |
| | gaacgatgcgcaggcgccgaaaaccggcggtggttctg |
| | gt (SEQ ID NO: 267) |
| GSAT | Ggtggttctgccggtggctccggttctggctccagcgg |
| | tggcagctctggtgcgtccggcacgggtactgcgggtg |
| | gcactggcagcggttccggtactggctctggc (SEQ |
| | ID NO: 268) |

[0841] A nucleotide deaminase or other RNA modification enzyme may be linked to CRISPR-Cas or a dead CRISPR-Cas via one or more amino acids. In some cases, the nucleotide deaminase may be linked to the CRISPR-Cas or a dead CRISPR-Cas via one or more amino acids 411-429, 114-124, 197-241, and 607-624. The amino acid position may correspond to a CRISPR-Cas ortholog disclosed herein. In certain examples, the nucleotide deaminase may be is linked to the dead CRISPR-Cas via one or more amino acids corresponding to amino 411-429, 114-124, 197-241, and 607-624 of Prevotella buccae CRISPR-Cas.

### Methods of Use in General

[0842] In another aspect, the present disclosure discloses methods of using the compositions and systems herein. In general, the methods include modifying a target nucleic acid by introducing in a cell or organism that comprises the target nucleic acid the engineered CRISPR-Cas protein, polynucleotide(s) encoding engineered CRISPR-Cas protein, the CRISPR-Cas system, or the vector or vector system comprising the polynucleotide(s), such that the engineered CRISPR-Cas protein modifies the target nucleic acid in the cell or organism. The engineered CRISPR-Cas protein or system may be introduced via delivery by liposomes, nanoparticles, exosomes, microvesicles, nucleic acid nanoassemblies, a gene gun, an implantable device, or the vector system herein. The cell or organisms may be a eukaryotic cell or organism. The cell or organisms is an animal cell or organism. The cell or organisms is a plant cell or organism. Examples of nucleic acid nanoassemblies include DNA origami and RNA origami, e.g., those described in U.S. Pat. No. 8,554,489, US20160103951, WO2017189914, and WO2017189870, which are incorporated by reference in their entireties. A gene gun may include a biolistic particle delivery system, which is a device for delivering exogenous DNA (transgenes) to cells. The payload may be an elemental particle of a heavy metal coated with DNA (typically plasmid DNA). An example of delivery components in CRISPR-Cas systems is described in Svitashev et al., Nat Commun. 2016; 7: 13274.

[0843] In some embodiments, the target nucleic acid comprises a genomic locus, and the engineered CRISPR-Cas protein modifies gene product encoded at the genomic locus or expression of the gene product. The target nucleic acid is DNA or RNA and wherein one or more nucleotides in the target nucleic acid may be base edited. The target nucleic acid may be DNA or RNA and wherein the target nucleic acid is cleaved. The engineered CRISPR-Cas protein may further cleave non-target nucleic acid.

[0844] In some embodiments, the methods may further comprise visualizing activity and, optionally, using a detectable label. The method may also comprise detecting binding of one or more components of the CRISPR-Cas system to the target nucleic acid.

[0845] In another aspect the methods of use include detecting a target nucleic acid in a sample. In some embodiments, the methods include contacting a sample with: an engineered CRISPR-Cas protein herein; at least one guide polynucleotide comprising a guide sequence capable of binding to the target nucleic acid and designed to form a complex with the engineered CRISPR-Cas; and a RNA-based masking construct comprising a non-target sequence; wherein the engineered CRISPR-Cas protein exhibits collateral RNase activity and cleaves the non-target sequence of the detection construct; and detecting a signal from cleavage of the non-target sequence, thereby detecting the target nucleic acid in the sample. The methods may further comprise contacting the sample with reagents for amplifying the target nucleic acid. The reagents for amplifying may comprise isothermal amplification reaction reagents. The isothermal amplification reagents may comprise nucleic-acid sequence-based amplification, recombinase polymerase amplification, loop-mediated isothermal amplification, strand displacement amplification, helicase-dependent amplification, or nicking enzyme amplification reagents. The target nucleic acid is DNA molecule and the method may further comprise contacting the target DNA molecule with a primer comprising an RNA polymerase site and RNA polymerase.

[0846] The masking construct: suppresses generation of a detectable positive signal until the masking construct cleaved or deactivated, or masks a detectable positive signal or generates a detectable negative signal until the masking construct cleaved or deactivated. The masking construct may comprise: a silencing RNA that suppresses generation of a gene product encoded by a reporting construct, wherein the gene product generates the detectable positive signal when expressed; a ribozyme that generates the negative detectable signal, and wherein the positive detectable signal is generated when the ribozyme is deactivated; or a ribozyme that converts a substrate to a first color and wherein the substrate converts to a second color when the ribozyme is deactivated; an aptamer and/or comprises a polynucleotide-tethered inhibitor; a polynucleotide to which a detectable ligand and a masking component are attached; a nanoparticle held in aggregate by bridge molecules, wherein at least a portion of the bridge molecules comprises a polynucleotide, and wherein the solution undergoes a color shift when the nanoparticle is disbursed in solution; a quantum dot or fluorophore linked to one or more quencher molecules by a linking molecule, wherein at least a portion of the linking molecule comprises a polynucleotide; a polynucleotide in complex with an intercalating agent, wherein the intercalating agent changes absorbance upon cleavage of the polynucleotide; or two fluorophores tethered by a polynucleotide that undergo a shift in fluorescence when released from the polynucleotide.

[0847] The aptamer may comprise a polynucleotide-tethered inhibitor that sequesters an enzyme, wherein the enzyme generates a detectable signal upon release from the aptamer or polynucleotide-tethered inhibitor by acting upon a substrate; or may be an inhibitory aptamer that inhibits an enzyme and prevents the enzyme from catalyzing generation of a detectable signal from a substrate or wherein the polynucleotide-tethered inhibitor inhibits an enzyme and prevents the enzyme from catalyzing generation of a detectable signal from a substrate; or sequesters a pair of agents that when released from the aptamers combine to generate a detectable signal.

[0848] The nanoparticle may be a colloidal metal. The colloidal metal material may include water-insoluble metal particles or metallic compounds dispersed in a liquid, a hydrosol, or a metal sol. The colloidal metal may be selected from the metals in groups IA, IB, IIB and IIIB of the periodic table, as well as the transition metals, especially those of group VIII. Preferred metals include gold, silver, aluminum, ruthenium, zinc, iron, nickel and calcium. Other suitable metals also include the following in all of their various oxidation states: lithium, sodium, magnesium, potassium, scandium, titanium, vanadium, chromium, manganese, cobalt, copper, gallium, strontium, niobium, molybdenum, palladium, indium, tin, tungsten, rhenium, platinum, and gadolinium. The metals are preferably provided in ionic form, derived from an appropriate metal compound, for example the Al³⁺, Ru³⁺, Zn²⁺, Ni²⁺ and Ca²⁺ ions.

[0849] When the RNA bridge is cut by the activated CRISPR effector, the beforementioned color shift is observed. In certain example embodiments the particles are colloidal metals. In certain other example embodiments, the colloidal metal is a colloidal gold. In certain example embodiments, the colloidal nanoparticles are 15 nm gold nanoparticles (AuNPs). Due to the unique surface properties of colloidal gold nanoparticles, maximal absorbance is observed at 520 nm when fully dispersed in solution and appear red in color to the naked eye. Upon aggregation of AuNPs, they exhibit a red-shift in maximal absorbance and appear darker in color, eventually precipitating from solution as a dark purple aggregate.

[0850] In some embodiments, at least one guide polynucleotide comprises a mismatch. The mismatch may be up- or downstream of a single nucleotide variation on the one or more guide sequences. In certain embodiments, modulations of cleavage efficiency can be exploited by introduction of mismatches, e.g. 1 or more mismatches, such as 1 or 2 mismatches between spacer sequence and target sequence, including the position of the mismatch along the spacer/target. The more central (i.e. not 3′ or 5′) for instance a double mismatch is, the more cleavage efficiency is affected. Accordingly, by choosing mismatch position along the spacer, cleavage efficiency can be modulated. By means of example, if less than 100% cleavage of targets is desired (e.g. in a cell population), 1 or more, such as preferably 2 mismatches between spacer and target sequence may be introduced in the spacer sequences. The more central along the spacer of the mismatch position, the lower the cleavage percentage. In certain example embodiments, the cleavage efficiency may be exploited to design single guides that can distinguish two or more targets that vary by a single nucleotide, such as a single nucleotide polymorphism (SNP), variation, or (point) mutation. The CRISPR effector may have reduced sensitivity to SNPs (or other single nucleotide variations) and continue to cleave SNP targets with a certain level of efficiency. Thus, for two targets, or a set of targets, a guide RNA may be designed with a nucleotide sequence that is complementary to one of the targets i.e. the on-target SNP. The guide RNA is further designed to have a synthetic mismatch. As used herein a “synthetic mismatch” refers to a non-naturally occurring mismatch that is introduced upstream or downstream of the naturally occurring SNP, such as at most 5 nucleotides upstream or downstream, for instance 4, 3, 2, or 1 nucleotide upstream or downstream, preferably at most 3 nucleotides upstream or downstream, more preferably at most 2 nucleotides upstream or downstream, most preferably 1 nucleotide upstream or downstream (i.e. adjacent the SNP). When the CRISPR effector binds to the on-target SNP, only a single mismatch will be formed with the synthetic mismatch and the CRISPR effector will continue to be activated and a detectable signal produced. When the guide RNA hybridizes to an off-target SNP, two mismatches will be formed, the mismatch from the SNP and the synthetic mismatch, and no detectable signal generated. Thus, the systems disclosed herein may be designed to distinguish SNPs within a population. For, example the systems may be used to distinguish pathogenic strains that differ by a single SNP or detect certain disease specific SNPs, such as but not limited to, disease associated SNPs, such as without limitation cancer associated SNPs.

[0851] In certain embodiments, the guide RNA is designed such that the SNP is located on position 1, 2, 3, 4, 5, 6, 7, 8, 9, 10, 11, 12, 13, 14, 15, 16, 17, 18, 19, 20, 21, 22, 23, 24, 25, 26, 27, 28, 29, or 30 of the spacer sequence (starting at the 5′ end). In certain embodiments, the guide RNA is designed such that the SNP is located on position 1, 2, 3, 4, 5, 6, 7, 8, or 9 of the spacer sequence (starting at the 5′ end). In certain embodiments, the guide RNA is designed such that the SNP is located on position 2, 3, 4, 5, 6, or 7 of the spacer sequence (starting at the 5′ end). In certain embodiments, the guide RNA is designed such that the SNP is located on position 3, 4, 5, or 6 of the spacer sequence (starting at the 5′ end). In certain embodiments, the guide RNA is designed such that the SNP is located on position 3 of the spacer sequence (starting at the 5′ end).

[0852] In certain embodiments, the guide RNA is designed such that the mismatch (e.g. The synthetic mismatch, i.e. an additional mutation besides a SNP) is located on position 1, 2, 3, 4, 5, 6, 7, 8, 9, 10, 11, 12, 13, 14, 15, 16, 17, 18, 19, 20, 21, 22, 23, 24, 25, 26, 27, 28, 29, or 30 of the spacer sequence (starting at the 5′ end). In certain embodiments, the guide RNA is designed such that the mismatch is located on position 1, 2, 3, 4, 5, 6, 7, 8, or 9 of the spacer sequence (starting at the 5′ end). In certain embodiments, the guide RNA is designed such that the mismatch is located on position 4, 5, 6, or 7 of the spacer sequence (starting at the 5′ end. In certain embodiments, the guide RNA is designed such that the mismatch is located on position 5 of the spacer sequence (starting at the 5′ end).

[0853] In certain embodiments, the guide RNA is designed such that the mismatch is located 2 nucleotides upstream of the SNP (i.e. one intervening nucleotide). In certain embodiments, the guide RNA is designed such that the mismatch is located 2 nucleotides downstream of the SNP (i.e. one intervening nucleotide). In certain embodiments, the guide RNA is designed such that the mismatch is located on position 5 of the spacer sequence (starting at the 5′ end) and the SNP is located on position 3 of the spacer sequence (starting at the 5′ end).

### Transcript Tracking

[0854] In another aspect, the present disclosure provides compositions and methods for transcript tracking. In some embodiments, transcript tracking allows researchers to visualize transcripts in cells, tissues, organs or animals, providing important spatio-temporal information regarding RNA dynamics and function. An example approach is shown in FIG. 102.

[0855] In some embodiments, the compositions may be a CRISPR-Cas protein herein with one or more labels, or a CRISPR-Cas system comprising such labeled CRISPR-Cas protein. The CRISPR-Cas protein or system may bind to one or more transcripts such that the transcripts may be detected (e.g., visualized) using the label on the CRISPR-Cas protein.

[0856] In some embodiments, the present disclosure includes a system for expressing a CRISPR-Cas protein with one or more polypeptides or polynucleotide labels. The system may comprise polynucleotides encoding the CRISPR-Cas protein and/or the labels. The system may further include vector systems comprising such polynucleotides. For example, a CRISPR-Cas protein may be fused with a fluorescent protein or a fragment thereof. Examples of fluorescent proteins include GFP proteins, EGFP, Azami-Green, Kaede, ZsGreen1 and CopGFP; CFP proteins, such as Cerulean, mCFP, AmCyan1, MiCy, and CyPet; BFP proteins such as EBFP; YFP proteins such as EYFP, YPet, Venus, ZsYellow, and mCitrine; OFP proteins such as cOFP, mKO, and mOrange; red fluorescent protein, or RFP; red or far-red fluorescent proteins from any other species, such as Heteractis reef coral and Actinia or Entacmaea sea anemone, as well as variants thereof. RFPs include, for example, Discosoma variants, such as mRFP1, mCherry, tdTomato, mStrawberry, mTangerine, DsRed2, and DsRed-T1, Anthomedusa J-Red and Anemonia AsRed2. Far-red fluorescent proteins include, for example, Actinia AQ143, Entacmaea eqFP611, Discosoma variants such as mPlum and mRasberry, and Heteractis HcRedl and t-HcRed.

[0857] In some cases, the systems for expressing the labeled CRISPR-Cas protein may be inducible. For example, the systems may comprise polynucleotides encoding the CRISPR-Cas protein and/or labels under control of a regulatory element herein, e.g., inducible promoters. Such systems may allow spatial and/or temporal control of the expression of the labels, thus enabling spatial and/or temporal control of transcript tracking.

[0858] In certain cases, the CRISPR-Cas may be labeled with a detectable tag. The labeling may be performed in cells. Alternatively or additionally, the labeling may be performed first and the labeled CRISPR-Cas protein is then delivered into cells, tissues, organs, or organs.

[0859] The detectable tags may be detected (e.g., visualized by imaging, ultrasound, or MRI). Examples of such detectable tags include detectable oligonucleotide tags may be, but are not limited to, oligonucleotides comprising unique nucleotide sequences, oligonucleotides comprising detectable moieties, and oligonucleotides comprising both unique nucleotide sequences and detectable moieties. In some cases, the detectable tag comprises a labeling substance, which is detectable by spectroscopic, photochemical, biochemical, immunochemical, electrical, optical or chemical means. Such tags include biotin for staining with labeled streptavidin conjugate, magnetic beads (e.g., Dynabeads®), fluorescent dyes (e.g., fluorescein, texas red, rhodamine, green fluorescent protein, and the like), radiolabels (e.g., ³H, 125I, ³⁵S, ¹⁴C, or ³²P), enzymes (e.g., horse radish peroxidase, alkaline phosphatase and others commonly used in an ELISA), and calorimetric labels such as colloidal gold or colored glass or plastic (e.g., polystyrene, polypropylene, latex, etc.) beads. Detectable tags may be detected by many methods. For example, radiolabels may be detected using photographic film or scintillation counters, fluorescent markers may be detected using a photodetector to detect emitted light. Enzymatic labels are typically detected by providing the enzyme with a substrate and detecting, the reaction product produced by the action of the enzyme on the substrate, and calorimetric labels are detected by simply visualizing the colored label. Examples of the labeling substance which may be employed include labeling substances known to those skilled in the art, such as fluorescent dyes, enzymes, coenzymes, chemiluminescent substances, and radioactive substances. Specific examples include radioisotopes (e.g., ³²P, ¹⁴C, ¹²⁵I, ³H, and ¹³¹I) fluorescein, rhodamine, dansyl chloride, umbelliferone, luciferase, peroxidase, alkaline phosphatase, β-galactosidase, β-glucosidase, horseradish peroxidase, glucoamylase, lysozyme, saccharide oxidase, microperoxidase, biotin, and ruthenium. In the case where biotin is employed as a labeling substance, preferably, after addition of a biotin-labeled antibody, streptavidin bound to an enzyme (e.g., peroxidase) is further added. Advantageously, the label is a fluorescent label. Examples of fluorescent labels include, but are not limited to, Atto dyes, 4-acetamido-4′-isothiocyanatostilbene-2,2′disulfonic acid; acridine and derivatives: acridine, acridine isothiocyanate; 5-(2′-aminoethyl)aminonaphthalene-1-sulfonic acid (EDANS); 4-amino-N-[3-vinyl sulfonyl)phenyl]naphthalimide-3,5 di sulfonate; N-(4-anilino-1-naphthyl)maleimide; anthranilamide; BODIPY; Brilliant Yellow; coumarin and derivatives; coumarin, 7-amino-4-methylcoumarin (AMC, Coumarin 120), 7-amino-4-trifluoromethylcouluarin (Coumaran 151); cyanine dyes; cyanosine; 4′,6-diaminidino-2-phenylindole (DAPI); 5′5″-dibromopyrogallol-sulfonaphthalein (Bromopyrogallol Red); 7-diethylamino-3-(4′-isothiocyanatophenyl)-4-methylcoumarin; diethylenetriamine pentaacetate; 4,4′-diisothiocyanatodihydro-stilbene-2,2′-disulfonic acid; 4,4′-diisothiocyanatostilbene-2,2′-disulfonic acid; 5-[dimethylamino]naphthalene-1-sulfonyl chloride (DNS, dansylchloride); 4-dimethylaminophenylazophenyl-4′-isothiocyanate (DABITC); eosin and derivatives; eosin, eosin isothiocyanate, erythrosin and derivatives; erythrosin B, erythrosin, isothiocyanate; ethidium; fluorescein and derivatives; 5-carboxyfluorescein (FAM), 5-(4,6-dichlorotriazin-2-yl)aminofluorescein (DTAF), 2′,7′-dimethoxy-4′5′-dichloro-6-carboxyfluorescein, fluorescein, fluorescein isothiocyanate, QFITC, (XRITC); fluorescamine; IR144; IR1446; Malachite Green isothiocyanate; 4-methylumbelliferoneortho cresolphthalein; nitrotyrosine; pararosaniline; Phenol Red; B-phycoerythrin; o-phthaldialdehyde; pyrene and derivatives: pyrene, pyrene butyrate, succinimidyl 1-pyrene; butyrate quantum dots; Reactive Red 4 (Cibacron™ Brilliant Red 3B-A) rhodamine and derivatives: 6-carboxy-X-rhodamine (ROX), 6-carboxyrhodamine (R6G), lissamine rhodamine B sulfonyl chloride rhodamine (Rhod), rhodamine B, rhodamine 123, rhodamine X isothiocyanate, sulforhodamine B, sulforhodamine 101, sulfonyl chloride derivative of sulforhodamine 101 (Texas Red); N,N,N′,N′ tetramethyl-6-carboxyrhodamine (TAMRA); tetramethyl rhodamine; tetramethyl rhodamine isothiocyanate (TRITC); riboflavin; rosolic acid; terbium chelate derivatives; Cy3; Cy5; Cy5.5; Cy7; IRD 700; IRD 800; La Jolta Blue; phthalo cyanine; and naphthalo cyanine. A fluorescent label may be a fluorescent protein, such as blue fluorescent protein, cyan fluorescent protein, green fluorescent protein, red fluorescent protein, yellow fluorescent protein or any photoconvertible protein. Colorimetric labeling, bioluminescent labeling and/or chemiluminescent labeling may further accomplish labeling. Labeling further may include energy transfer between molecules in the hybridization complex by perturbation analysis, quenching, or electron transport between donor and acceptor molecules, the latter of which may be facilitated by double stranded match hybridization complexes. The fluorescent label may be a perylene or a terrylen. In the alternative, the fluorescent label may be a fluorescent bar code. Advantageously, the label may be light sensitive, wherein the label is light-activated and/or light cleaves the one or more linkers to release the molecular cargo. The light-activated molecular cargo may be a major light-harvesting complex (LHCII). In another embodiment, the fluorescent label may induce free radical formation. In some embodiments, the detectable moieties may be quantum dots.

[0860] In some embodiments, the present disclosure provides for a system for delivery the labeled CRISPR-Cas proteins or labeled CRISPR-Cas systems. The delivery system may comprise any delivery vehicles, e.g., those described herein such as RNP, liposomes, nanoparticles, exosomes, microvesicles, nucleic acid nanoassemblies, a gene gun, an implantable device, or the vector systems herein.

### Nucleic Acid Targeting

[0861] In certain embodiments, the CRISPR-Cas effector protein of the invention is, or in, or comprises, or consists essentially of, or consists of, or involves or relates to such a protein from or as set forth in Tables 1-4, wherein one or more amino acids are mutated, as described herein elsewhere. Thus, in some embodiments, the effector protein may be a RNA-binding protein, such as a dead-Cas type effector protein, which may be optionally functionalized as described herein for instance with an transcriptional activator or repressor domain, NLS or other functional domain. In some embodiments, the effector protein may be a RNA-binding protein that cleaves a single strand of RNA. If the RNA bound is ssRNA, then the ssRNA is fully cleaved. In some embodiments, the effector protein may be a RNA-binding protein that cleaves a double strand of RNA, for example if it comprises two RNase domains. If the RNA bound is dsRNA, then the dsRNA is fully cleaved. In some embodiments, the effector protein may be a RNA-binding protein that has nickase activity, i.e. it binds dsRNA, but only cleaves one of the RNA strands.

[0862] RNase function in CRISPR systems is known, for example mRNA targeting has been reported for certain type III CRISPR-Cas systems (Hale et al., 2014, Genes Dev, vol. 28, 2432-2443; Hale et al., 2009, Cell, vol. 139, 945-956; Peng et al., 2015, Nucleic acids research, vol. 43, 406-417) and provides significant advantages. A CRISPR-Cas system, composition or method targeting RNA via the present effector proteins is thus provided.

[0863] The target RNA, i.e. the RNA of interest, is the RNA to be targeted by the present invention leading to the recruitment to, and the binding of the effector protein at, the target site of interest on the target RNA. The target RNA may be any suitable form of RNA. This may include, in some embodiments, mRNA. In other embodiments, the target RNA may include tRNA or rRNA.

### Self-Inactivating Systems

[0864] Once all copies of RNA in a cell have been edited, continued a CRISPR-Cas effector protein expression or activity in that cell is no longer necessary. A Self-Inactivating system that relies on the use of RNA as to the CRISPR-Cas or crRNA as the guide target sequence can shut down the system by preventing expression of CRISPR-Cas or complex formation.

### Examples of Target RNAs

[0865] The compositions and systems herein may be used for editing various types of target RNAs. Examples of target RNAs are described below.

Interfering RNA (RNAi) and microRNA (miRNA)

[0866] In other embodiments, the target RNA may include interfering RNA, i.e. RNA involved in an RNA interference pathway, such as shRNA, siRNA and so forth. In other embodiments, the target RNA may include microRNA (miRNA). Control over interfering RNA or miRNA may help reduce off-target effects (OTE) seen with those approaches by reducing the longevity of the interfering RNA or miRNA in vivo or in vitro.

[0867] If the effector protein and suitable guide are selectively expressed (for example spatially or temporally under the control of a suitable promoter, for example a tissue- or cell cycle-specific promoter and/or enhancer) then this could be used to ‘protect’ the cells or systems (in vivo or in vitro) from RNAi in those cells. This may be useful in neighboring tissues or cells where RNAi is not required or for the purposes of comparison of the cells or tissues where the effector protein and suitable guide are and are not expressed (i.e. where the RNAi is not controlled and where it is, respectively). The effector protein may be used to control or bind to molecules comprising or consisting of RNA, such as ribozymes, ribosomes or riboswitches. In embodiments of the invention, the RNA guide can recruit the effector protein to these molecules so that the effector protein is able to bind to them.

Ribosomal RNA (rRNA)

[0868] For example, azalide antibiotics such as azithromycin, are well known. They target and disrupt the 50S ribosomal subunit. The present effector protein, together with a suitable guide RNA to target the 50S ribosomal subunit, may be, in some embodiments, recruited to and bind to the 50S ribosomal subunit. Thus, the present effector protein in concert with a suitable guide directed at a ribosomal (especially the 50s ribosomal subunit) target is provided. Use of this use effector protein in concert with the suitable guide directed at the ribosomal (especially the 50s ribosomal subunit) target may include antibiotic use. In particular, the antibiotic use is analogous to the action of azalide antibiotics, such as azithromycin. In some embodiments, prokaryotic ribosomal subunits, such as the 70S subunit in prokaryotes, the 50S subunit mentioned above, the 30S subunit, as well as the 16S and 5S subunits may be targeted. In other embodiments, eukaryotic ribosomal subunits, such as the 80S subunit in eukaryotes, the 60S subunit, the 40S subunit, as well as the 28S, 18S. 5.8S and 5S subunits may be targeted.

[0869] The effector protein may be a RNA-binding protein, optionally functionalized, as described herein. In some embodiments, the effector protein may be a RNA-binding protein that cleaves a single strand of RNA. In either case, but particularly where the RNA-binding protein cleaves a single strand of RNA, then ribosomal function may be modulated and, in particular, reduced or destroyed. This may apply to any ribosomal RNA and any ribosomal subunit and the sequences of rRNA are well known.

[0870] Control of ribosomal activity is thus envisaged through use of the present effector protein in concert with a suitable guide to the ribosomal target. This may be through cleavage of, or binding to, the ribosome. In particular, reduction of ribosomal activity is envisaged. This may be useful in assaying ribosomal function in vivo or in vitro, but also as a means of controlling therapies based on ribosomal activity, in vivo or in vitro. Furthermore, control (i.e. reduction) of protein synthesis in an in vivo or in vitro system is envisaged, such control including antibiotic and research and diagnostic use.

### Riboswitches

[0871] A riboswitch (also known as an aptozyme) is a regulatory segment of a messenger RNA molecule that binds a small molecule. This typically results in a change in production of the proteins encoded by the mRNA. Thus, control of riboswitch activity is thus envisaged through use of the present effector protein in concert with a suitable guide to the riboswitch target. This may be through cleavage of, or binding to, the riboswitch. In particular, reduction of riboswitch activity is envisaged. This may be useful in assaying riboswitch function in vivo or in vitro, but also as a means of controlling therapies based on riboswitch activity, in vivo or in vitro. Furthermore, control (i.e. reduction) of protein synthesis in an in vivo or in vitro system is envisaged. This control, as for rRNA may include antibiotic and research and diagnostic use.

### Ribozymes

[0872] Ribozymes are RNA molecules having catalytic properties, analogous to enzymes (which are of course proteins). As ribozymes, both naturally occurring and engineered, comprise or consist of RNA, they may also be targeted by the present RNA-binding effector protein. In some embodiments, the effector protein may be a RNA-binding protein cleaves the ribozyme to thereby disable it. Control of ribozymal activity is thus envisaged through use of the present effector protein in concert with a suitable guide to the ribozymal target. This may be through cleavage of, or binding to, the ribozyme. In particular, reduction of ribozymal activity is envisaged. This may be useful in assaying ribozymal function in vivo or in vitro, but also as a means of controlling therapies based on ribozymal activity, in vivo or in vitro.

### RNA-Targeting Applications

### Gene Expression, Including RNA Processing

[0873] The effector protein may also be used, together with a suitable guide, to target gene expression, including via control of RNA processing. The control of RNA processing may include RNA processing reactions such as RNA splicing, including alternative splicing, via targeting of RNApol; viral replication (in particular of satellite viruses, bacteriophages and retroviruses, such as HBV, HBC and HIV and others listed herein) including virioids in plants; and tRNA biosynthesis. The effector protein and suitable guide may also be used to control RNA activation (RNAa). RNAa leads to the promotion of gene expression, so control of gene expression may be achieved that way through disruption or reduction of RNAa and thus less promotion of gene expression.

### RNAi Screens

[0874] Identifying gene products whose knockdown is associated with phenotypic changes, biological pathways can be interrogated and the constituent parts identified, via RNAi screens. Control may also be exerted over or during these screens by use of the effector protein and suitable guide to remove or reduce the activity of the RNAi in the screen and thus reinstate the activity of the (previously interfered with) gene product (by removing or reducing the interference/repression).

[0875] Satellite RNAs (satRNAs) and satellite viruses may also be treated.

[0876] Control herein with reference to RNase activity generally means reduction, negative disruption or known-down or knock out.

### In Vivo RNA Applications

### Inhibition of Gene Expression

[0877] The target-specific RNases provided herein allow for very specific cutting of a target RNA. The interference at RNA level allows for modulation both spatially and temporally and in a non-invasive way, as the genome is not modified.

[0878] A number of diseases have been demonstrated to be treatable by mRNA targeting. While most of these studies relate to administration of siRNA, it is clear that the RNA targeting effector proteins provided herein can be applied in a similar way.

[0879] Examples of mRNA targets (and corresponding disease treatments) are VEGF, VEGF-R1 and RTP801 (in the treatment of AMD and/or DME), Caspase 2 (in the treatment of Naion)ADRB2 (in the treatment of intraocular pressure), TRPVI (in the treatment of Dry eye syndrome, Syk kinase (in the treatment of asthma), Apo B (in the treatment of hypercholesterolemia), PLK1, KSP and VEGF (in the treatment of solid tumors), Ber-Abl (in the treatment of CML)(Burnett and Rossi Chem Biol. 2012, 19(1): 60-71)). Similarly, RNA targeting has been demonstrated to be effective in the treatment of RNA-virus mediated diseases such as HIV (targeting of HIV Tet and Rev), RSV (targeting of RSV nucleocapsid) and HCV (targeting of miR-122) (Burnett and Rossi Chem Biol. 2012, 19(1): 60-71).

[0880] It is further envisaged that the RNA targeting effector protein of the invention can be used for mutation specific or allele specific knockdown. Guide RNA's can be designed that specifically target a sequence in the transcribed mRNA comprising a mutation or an allele-specific sequence. Such specific knockdown is particularly suitable for therapeutic applications relating to disorders associated with mutated or allele-specific gene products. For example, most cases of familial hypobetalipoproteinemia (FHBL) are caused by mutations in the ApoB gene. This gene encodes two versions of the apolipoprotein B protein: a short version (ApoB-48) and a longer version (ApoB-100). Several ApoB gene mutations that lead to FHBL cause both versions of ApoB to be abnormally short. Specifically targeting and knockdown of mutated ApoB mRNA transcripts with an RNA targeting effector protein of the invention may be beneficial in treatment of FHBL. As another example, Huntington's disease (HD) is caused by an expansion of CAG triplet repeats in the gene coding for the Huntingtin protein, which results in an abnormal protein. Specifically targeting and knockdown of mutated or allele-specific mRNA transcripts encoding the Huntingtin protein with an RNA targeting effector protein of the invention may be beneficial in treatment of HD.

### Modulation of Gene Expression Through Modulation of RNA Function

[0881] Apart from a direct effect on gene expression through cleavage of the mRNA, RNA targeting can also be used to impact specific aspects of the RNA processing within the cell, which may allow a more subtle modulation of gene expression. Generally, modulation can for instance be mediated by interfering with binding of proteins to the RNA, such as for instance blocking binding of proteins, or recruiting RNA binding proteins. Indeed, modulations can be ensured at different levels such as splicing, transport, localization, translation and turnover of the mRNA. Similarly in the context of therapy, it can be envisaged to address (pathogenic) malfunctioning at each of these levels by using RNA-specific targeting molecules. In these embodiments it is in many cases preferred that the RNA targeting protein is a “dead” CRISPR-Cas that has lost the ability to cut the RNA target but maintains its ability to bind thereto, such as the mutated forms of CRISPR-Cas described herein.

### a) Alternative Splicing

[0882] Many of the human genes express multiple mRNAs as a result of alternative splicing. Different diseases have been shown to be linked to aberrant splicing leading to loss of function or gain of function of the expressed gene. While some of these diseases are caused by mutations that cause splicing defects, a number of these are not. One therapeutic option is to target the splicing mechanism directly. The RNA targeting effector proteins described herein can for instance be used to block or promote slicing, include or exclude exons and influence the expression of specific isoforms and/or stimulate the expression of alternative protein products. Such applications are described in more detail below.

[0883] A RNA targeting effector protein binding to a target RNA can sterically block access of splicing factors to the RNA sequence. The RNA targeting effector protein targeted to a splice site may block splicing at the site, optionally redirecting splicing to an adjacent site. For instance a RNA targeting effector protein binding to the 5′ splice site binding can block the recruitment of the U1 component of the spliceosome, favoring the skipping of that exon. Alternatively, a RNA targeting effector protein targeted to a splicing enhancer or silencer can prevent binding of transacting regulatory splicing factors at the target site and effectively block or promote splicing. Exon exclusion can further be achieved by recruitment of ILF2/3 to precursor mRNA near an exon by an RNA targeting effector protein as described herein. As yet another example, a glycine rich domain can be attached for recruitment of hnRNP A1 and exon exclusion (Del Gatto-Konczak et al. Mol Cell Biol. 1999 January; 19(1):251-60).

[0884] In certain embodiments, through appropriate selection of gRNA, specific splice variants may be targeted, while other splice variants will not be targeted

[0885] In some cases the RNA targeting effector protein can be used to promote slicing (e.g. where splicing is defective). For instance a RNA targeting effector protein can be associated with an effector capable of stabilizing a splicing regulatory stem-loop in order to further splicing. The RNA targeting effector protein can be linked to a consensus binding site sequence for a specific splicing factor in order to recruit the protein to the target DNA.

[0886] Examples of diseases which have been associated with aberrant splicing include, but are not limited to Paraneoplastic Opsoclonus Myoclonus Ataxia (or POMA), resulting from a loss of Nova proteins which regulate splicing of proteins that function in the synapse, and Cystic Fibrosis, which is caused by defective splicing of a cystic fibrosis transmembrane conductance regulator, resulting in the production of nonfunctional chloride channels. In other diseases aberrant RNA splicing results in gain-of-function. This is the case for instance in myotonic dystrophy which is caused by a CUG triplet-repeat expansion (from 50 to >1500 repeats) in the 3′UTR of an mRNA, causing splicing defects.

[0887] The RNA targeting effector protein can be used to include an exon by recruiting a splicing factor (such as U1) to a 5′ splicing site to promote excision of introns around a desired exon. Such recruitment could be mediated trough a fusion with an arginine/serine rich domain, which functions as splicing activator (Gravely B R and Maniatis T, Mol Cell. 1998 (5):765-71).

[0888] It is envisaged that the RNA targeting effector protein can be used to block the splicing machinery at a desired locus, resulting in preventing exon recognition and the expression of a different protein product. An example of a disorder that may treated is Duchenne muscular dystrophy (DMD), which is caused by mutations in the gene encoding for the dystrophin protein. Almost all DMD mutations lead to frameshifts, resulting in impaired dystrophin translation. The RNA targeting effector protein can be paired with splice junctions or exonic splicing enhancers (ESEs) thereby preventing exon recognition, resulting in the translation of a partially functional protein. This converts the lethal Duchenne phenotype into the less severe Becker phenotype.

### b) RNA Modification

[0889] RNA editing is a natural process whereby the diversity of gene products of a given sequence is increased by minor modification in the RNA. Typically, the modification involves the conversion of adenosine (A) to inosine (I), resulting in an RNA sequence which is different from that encoded by the genome. RNA modification is generally ensured by the ADAR enzyme, whereby the pre-RNA target forms an imperfect duplex RNA by base-pairing between the exon that contains the adenosine to be edited and an intronic non-coding element. A classic example of A-I editing is the glutamate receptor GluR-B mRNA, whereby the change results in modified conductance properties of the channel (Higuchi M, et al. Cell. 1993; 75:1361-70).

[0890] In humans, a heterozygous functional-null mutation in the ADAR1 gene leads to a skin disease, human pigmentary genodermatosis (Miyamura Y, et al. Am J Hum Genet. 2003; 73:693-9). It is envisaged that the RNA targeting effector proteins of the present invention can be used to correct malfunctioning RNA modification.

### c) Polyadenylation

[0891] Polyadenylation of an mRNA is important for nuclear transport, translation efficiency and stability of the mRNA, and all of these, as well as the process of polyadenylation, depend on specific RBPs. Most eukaryotic mRNAs receive a 3′ poly(A) tail of about 200 nucleotides after transcription. Polyadenylation involves different RNA-binding protein complexes which stimulate the activity of a poly(A)polymerase (Minvielle-Sebastia L et al. Curr Opin Cell Biol. 1999; 11:352-7). It is envisaged that the RNA-targeting effector proteins provided herein can be used to interfere with or promote the interaction between the RNA-binding proteins and RNA.

[0892] Examples of diseases which have been linked to defective proteins involved in polyadenylation are oculopharyngeal muscular dystrophy (OPMD) (Brais B, et al. Nat Genet. 1998; 18:164-7).

### d) RNA Export

[0893] After pre-mRNA processing, the mRNA is exported from the nucleus to the cytoplasm. This is ensured by a cellular mechanism which involves the generation of a carrier complex, which is then translocated through the nuclear pore and releases the mRNA in the cytoplasm, with subsequent recycling of the carrier.

[0894] Overexpression of proteins (such as TAP) which play a role in the export of RNA has been found to increase export of transcripts that are otherwise inefficiently exported in Xenopus (Katahira J, et al. EMBO J. 1999; 18:2593-609).

e) mRNA Localization

[0895] mRNA localization ensures spatially regulated protein production. Localization of transcripts to a specific region of the cell can be ensured by localization elements. In particular embodiments, it is envisaged that the effector proteins described herein can be used to target localization elements to the RNA of interest. The effector proteins can be designed to bind the target transcript and shuttle them to a location in the cell determined by its peptide signal tag. More particularly for instance, a RNA targeting effector protein fused to a nuclear localization signal (NLS) can be used to alter RNA localization.

[0896] Further examples of localization signals include the zipcode binding protein (ZBP1) which ensures localization of β-actin to the cytoplasm in several asymmetric cell types, KDEL retention sequence (localization to endoplasmic reticulum), nuclear export signal (localization to cytoplasm), mitochondrial targeting signal (localization to mitochondria), peroxisomal targeting signal (localization to peroxisome) and m6A marking/YTHDF2 (localization to p-bodies). Other approaches that are envisaged are fusion of the RNA targeting effector protein with proteins of known localization (for instance membrane, synapse).

[0897] Alternatively, the effector protein according to the invention may for instance be used in localization-dependent knockdown. By fusing the effector protein to an appropriate localization signal, the effector is targeted to a particular cellular compartment. Only target RNAs residing in this compartment will effectively be targeted, whereas otherwise identical targets, but residing in a different cellular compartment will not be targeted, such that a localization dependent knockdown can be established.

### f) Translation

[0898] The RNA targeting effector proteins described herein can be used to enhance or repress translation. It is envisaged that upregulating translation is a very robust way to control cellular circuits. Further, for functional studies a protein translation screen can be favorable over transcriptional upregulation screens, which have the shortcoming that upregulation of transcript does not translate into increased protein production.

[0899] It is envisaged that the RNA targeting effector proteins described herein can be used to bring translation initiation factors, such as EIF4G in the vicinity of the 5′ untranslated repeat (5′UTR) of a messenger RNA of interest to drive translation (as described in De Gregorio et al. EMBO J. 1999; 18(17):4865-74 for a non-reprogrammable RNA binding protein). As another example GLD2, a cytoplasmic poly(A) polymerase, can be recruited to the target mRNA by an RNA targeting effector protein. This would allow for directed polyadenylation of the target mRNA thereby stimulating translation.

[0900] Similarly, the RNA targeting effector proteins envisaged herein can be used to block translational repressors of mRNA, such as ZBP1 (Huttelmaier S, et al. Nature. 2005; 438:512-5). By binding to translation initiation site of a target RNA, translation can be directly affected.

[0901] In addition, fusing the RNA targeting effector proteins to a protein that stabilizes mRNAs, e.g. by preventing degradation thereof such as RNase inhibitors, it is possible to increase protein production from the transcripts of interest.

[0902] It is envisaged that the RNA targeting effector proteins described herein can be used to repress translation by binding in the 5′ UTR regions of a RNA transcript and preventing the ribosome from forming and beginning translation.

[0903] Further, the RNA targeting effector protein can be used to recruit Caf1, a component of the CCR4-NOT deadenylase complex, to the target mRNA, resulting in deadenylation or the target transcript and inhibition of protein translation.

[0904] For instance, the RNA targeting effector protein of the invention can be used to increase or decrease translation of therapeutically relevant proteins. Examples of therapeutic applications wherein the RNA targeting effector protein can be used to downregulate or upregulate translation are in amyotrophic lateral sclerosis (ALS) and cardiovascular disorders. Reduced levels of the glial glutamate transporter EAAT2 have been reported in ALS motor cortex and spinal cord, as well as multiple abnormal EAAT2 mRNA transcripts in ALS brain tissue. Loss of the EAAT2 protein and function thought to be the main cause of excitotoxicity in ALS. Restoration of EAAT2 protein levels and function may provide therapeutic benefit. Hence, the RNA targeting effector protein can be beneficially used to upregulate the expression of EAAT2 protein, e.g. by blocking translational repressors or stabilizing mRNA as described above. Apolipoprotein A1 is the major protein component of high density lipoprotein (HDL) and ApoA1 and HDL are generally considered as atheroprotective. It is envisaged that the RNA targeting effector protein can be beneficially used to upregulate the expression of ApoA1, e.g. by blocking translational repressors or stabilizing mRNA as described above.

g) mRNA Turnover

[0905] Translation is tightly coupled to mRNA turnover and regulated mRNA stability. Specific proteins have been described to be involved in the stability of transcripts (such as the ELAV/Hu proteins in neurons, Keene J D, 1999, Proc Natl Acad Sci USA. 96:5-7) and tristetraprolin (TTP). These proteins stabilize target mRNAs by protecting the messages from degradation in the cytoplasm (Peng S S et al., 1988, EMBO J. 17:3461-70).

[0906] It can be envisaged that the RNA-targeting effector proteins of the present invention can be used to interfere with or to promote the activity of proteins acting to stabilize mRNA transcripts, such that mRNA turnover is affected. For instance, recruitment of human TTP to the target RNA using the RNA targeting effector protein would allow for adenylate-uridylate-rich element (AU-rich element) mediated translational repression and target degradation. AU-rich elements are found in the 3′ UTR of many mRNAs that code for proto-oncogenes, nuclear transcription factors, and cytokines and promote RNA stability. As another example, the RNA targeting effector protein can be fused to HuR, another mRNA stabilization protein (Hinman M N and Lou H, Cell Mol Life Sci 2008; 65:3168-81), and recruit it to a target transcript to prolong its lifetime or stabilize short-lived mRNA.

[0907] It is further envisaged that the RNA-targeting effector proteins described herein can be used to promote degradation of target transcripts. For instance, m6A methyltransferase can be recruited to the target transcript to localize the transcript to P-bodies leading to degradation of the target.

[0908] As yet another example, an RNA targeting effector protein as described herein can be fused to the non-specific endonuclease domain PilT N-terminus (PIN), to recruit it to a target transcript and allow degradation thereof.

[0909] Patients with paraneoplastic neurological disorder (PND)-associated encephalomyelitis and neuropathy are patients who develop autoantibodies against Hu-proteins in tumors outside of the central nervous system (Szabo A et al. 1991, Cell; 67:325-33 which then cross the blood-brain barrier. It can be envisaged that the RNA-targeting effector proteins of the present invention can be used to interfere with the binding of auto-antibodies to mRNA transcripts.

[0910] Patients with dystrophy type 1 (DM1), caused by the expansion of (CUG)n in the 3′ UTR of dystrophia myotonica-protein kinase (DMPK) gene, are characterized by the accumulation of such transcripts in the nucleus. It is envisaged that the RNA targeting effector proteins of the invention fused with an endonuclease targeted to the (CUG)n repeats could inhibit such accumulation of aberrant transcripts.

h) Interaction with Multi-Functional Proteins

[0911] Some RNA-binding proteins bind to multiple sites on numerous RNAs to function in diverse processes. For instance, the hnRNP A1 protein has been found to bind exonic splicing silencer sequences, antagonizing the splicing factors, associate with telomere ends (thereby stimulating telomere activity) and bind miRNA to facilitate Drosha-mediated processing thereby affecting maturation. It is envisaged that the RNA-binding effector proteins of the present invention can interfere with the binding of RNA-binding proteins at one or more locations.

### i) RNA Folding

[0912] RNA adopts a defined structure in order to perform its biological activities. Transitions in conformation among alternative tertiary structures are critical to most RNA-mediated processes. However, RNA folding can be associated with several problems. For instance, RNA may have a tendency to fold into, and be upheld in, improper alternative conformations and/or the correct tertiary structure may not be sufficiently thermodynamically favored over alternative structures. The RNA targeting effector protein, in particular a cleavage-deficient or dead RNA targeting protein, of the invention may be used to direct folding of (m)RNA and/or capture the correct tertiary structure thereof.

### Use of RNA-Targeting Effector Protein in Modulating Cellular Status

[0913] In certain embodiments CRISPR-Cas in a complex with crRNA is activated upon binding to target RNA and subsequently cleaves any nearby ssRNA targets (i.e. “collateral” or “bystander” effects). CRISPR-Cas, once primed by the cognate target, can cleave other (non-complementary) RNA molecules. Such promiscuous RNA cleavage could potentially cause cellular toxicity, or otherwise affect cellular physiology or cell status.

[0914] Accordingly, in certain embodiments, the non-naturally occurring or engineered composition, vector system, or delivery systems as described herein are used for or are for use in induction of cell dormancy. In certain embodiments, the non-naturally occurring or engineered composition, vector system, or delivery systems as described herein are used for or are for use in induction of cell cycle arrest. In certain embodiments, the non-naturally occurring or engineered composition, vector system, or delivery systems as described herein are used for or are for use in reduction of cell growth and/or cell proliferation, In certain embodiments, the non-naturally occurring or engineered composition, vector system, or delivery systems as described herein are used for or are for use in induction of cell anergy. In certain embodiments, the non-naturally occurring or engineered composition, vector system, or delivery systems as described herein are used for or are for use in induction of cell apoptosis. In certain embodiments, the non-naturally occurring or engineered composition, vector system, or delivery systems as described herein are used for or are for use in induction of cell necrosis. In certain embodiments, the non-naturally occurring or engineered composition, vector system, or delivery systems as described herein are used for or are for use in induction of cell death. In certain embodiments, the non-naturally occurring or engineered composition, vector system, or delivery systems as described herein are used for or are for use in induction of programmed cell death.

[0915] In certain embodiments, the invention relates to a method for induction of cell dormancy comprising introducing or inducing the non-naturally occurring or engineered composition, vector system, or delivery systems as described herein. In certain embodiments, the invention relates to a method for induction of cell cycle arrest comprising introducing or inducing the non-naturally occurring or engineered composition, vector system, or delivery systems as described herein. In certain embodiments, the invention relates to a method for reduction of cell growth and/or cell proliferation comprising introducing or inducing the non-naturally occurring or engineered composition, vector system, or delivery systems as described herein. In certain embodiments, the invention relates to a method for induction of cell anergy comprising introducing or inducing the non-naturally occurring or engineered composition, vector system, or delivery systems as described herein. In certain embodiments, the invention relates to a method for induction of cell apoptosis comprising introducing or inducing the non-naturally occurring or engineered composition, vector system, or delivery systems as described herein. In certain embodiments, the invention relates to a method for induction of cell necrosis comprising introducing or inducing the non-naturally occurring or engineered composition, vector system, or delivery systems as described herein. In certain embodiments, the invention relates to a method for induction of cell death comprising introducing or inducing the non-naturally occurring or engineered composition, vector system, or delivery systems as described herein. In certain embodiments, the invention relates to a method for induction of programmed cell death comprising introducing or inducing the non-naturally occurring or engineered composition, vector system, or delivery systems as described herein.

[0916] The methods and uses as described herein may be therapeutic or prophylactic and may target particular cells, cell (sub)populations, or cell/tissue types. In particular, the methods and uses as described herein may be therapeutic or prophylactic and may target particular cells, cell (sub)populations, or cell/tissue types expressing one or more target sequences, such as one or more particular target RNA (e.g. ss RNA). Without limitation, target cells may for instance be cancer cells expressing a particular transcript, e.g. neurons of a given class, (immune) cells causing e.g. autoimmunity, or cells infected by a specific (e.g. viral) pathogen, etc.

[0917] Accordingly, in certain embodiments, the invention relates to a method for treating a pathological condition characterized by the presence of undesirable cells (host cells), comprising introducing or inducing the non-naturally occurring or engineered composition, vector system, or delivery systems as described herein. In certain embodiments, the invention relates the use of the non-naturally occurring or engineered composition, vector system, or delivery systems as described herein for treating a pathological condition characterized by the presence of undesirable cells (host cells). In certain embodiments, the invention relates the non-naturally occurring or engineered composition, vector system, or delivery systems as described herein for use in treating a pathological condition characterized by the presence of undesirable cells (host cells). It is to be understood that preferably the CRISPR-Cas system targets a target specific for the undesirable cells. In certain embodiments, the invention relates to the use of the non-naturally occurring or engineered composition, vector system, or delivery systems as described herein for treating, preventing, or alleviating cancer. In certain embodiments, the invention relates to the non-naturally occurring or engineered composition, vector system, or delivery systems as described herein for use in treating, preventing, or alleviating cancer. In certain embodiments, the invention relates to a method for treating, preventing, or alleviating cancer comprising introducing or inducing the non-naturally occurring or engineered composition, vector system, or delivery systems as described herein. It is to be understood that preferably the CRISPR-Cas system targets a target specific for the cancer cells. In certain embodiments, the invention relates to the use of the non-naturally occurring or engineered composition, vector system, or delivery systems as described herein for treating, preventing, or alleviating infection of cells by a pathogen. In certain embodiments, the invention relates to the non-naturally occurring or engineered composition, vector system, or delivery systems as described herein for use in treating, preventing, or alleviating infection of cells by a pathogen. In certain embodiments, the invention relates to a method for treating, preventing, or alleviating infection of cells by a pathogen comprising introducing or inducing the non-naturally occurring or engineered composition, vector system, or delivery systems as described herein. It is to be understood that preferably the CRISPR-Cas system targets a target specific for the cells infected by the pathogen (e.g. a pathogen derived target). In certain embodiments, the invention relates to the use of the non-naturally occurring or engineered composition, vector system, or delivery systems as described herein for treating, preventing, or alleviating an autoimmune disorder. In certain embodiments, the invention relates to the non-naturally occurring or engineered composition, vector system, or delivery systems as described herein for use in treating, preventing, or alleviating an autoimmune disorder. In certain embodiments, the invention relates to a method for treating, preventing, or alleviating an autoimmune disorder comprising introducing or inducing the non-naturally occurring or engineered composition, vector system, or delivery systems as described herein. It is to be understood that preferably the CRISPR-Cas system targets a target specific for the cells responsible for the autoimmune disorder (e.g. specific immune cells).

### Use of RNA-Targeting Effector Protein in RNA Detection

[0918] It is further envisaged that the RNA targeting effector protein can be used in Northern blot assays. Northern blotting involves the use of electrophoresis to separate RNA samples by size. The RNA targeting effector protein can be used to specifically bind and detect the target RNA sequence.

[0919] A RNA targeting effector protein can be fused to a fluorescent protein (such as GFP) and used to track RNA localization in living cells. More particularly, the RNA targeting effector protein can be inactivated in that it no longer cleaves RNA. In particular embodiments, it is envisaged that a split RNA targeting effector protein can be used, whereby the signal is dependent on the binding of both subproteins, in order to ensure a more precise visualization. Alternatively, a split fluorescent protein can be used that is reconstituted when multiple RNA targeting effector protein complexes bind to the target transcript. It is further envisaged that a transcript is targeted at multiple binding sites along the mRNA so the fluorescent signal can amplify the true signal and allow for focal identification. As yet another alternative, the fluorescent protein can be reconstituted form a split intein.

[0920] RNA targeting effector proteins are for instance suitably used to determine the localization of the RNA or specific splice variants, the level of mRNA transcript, up- or down-regulation of transcripts and disease-specific diagnosis. The RNA targeting effector proteins can be used for visualization of RNA in (living) cells using e.g. fluorescent microscopy or flow cytometry, such as fluorescence-activated cell sorting (FACS) which allows for high-throughput screening of cells and recovery of living cells following cell sorting. Further, expression levels of different transcripts can be assessed simultaneously under stress, e.g. inhibition of cancer growth using molecular inhibitors or hypoxic conditions on cells. Another application would be to track localization of transcripts to synaptic connections during a neural stimulus using two photon microscopy.

[0921] In certain embodiments, the components or complexes according to the invention as described herein can be used in multiplexed error-robust fluorescence in situ hybridization (MERFISH; Chen et al. Science; 2015; 348(6233)), such as for instance with (fluorescently) labeled CRISPR-Cas effectors.

### In Vitro Apex Labeling

[0922] Cellular processes depend on a network of molecular interactions among protein, RNA, and DNA. Accurate detection of protein—DNA and protein—RNA interactions is key to understanding such processes. In vitro proximity labeling technology employs an affinity tag combined with e.g. a photoactivatable probe to label polypeptides and RNAs in the vicinity of a protein or RNA of interest in vitro. After UV irradiation the photoactivatable group reacts with proteins and other molecules that are in close proximity to the tagged molecule, thereby labelling them. Labelled interacting molecules can subsequently be recovered and identified. The RNA targeting effector protein of the invention can for instance be used to target a probe to a selected RNA sequence.

[0923] These applications could also be applied in animal models for in vivo imaging of disease relevant applications or difficult-to culture cell types.

### Use of RNA-Targeting Effector Protein in RNA Origami/In Vitro Assembly Lines—Combinatorics

[0924] RNA origami refers to nanoscale folded structures for creating two-dimensional or three-dimensional structures using RNA as integrated template. The folded structure is encoded in the RNA and the shape of the resulting RNA is thus determined by the synthesized RNA sequence (Geary, et al. 2014. Science, 345 (6198). pp. 799-804). The RNA origami may act as scaffold for arranging other components, such as proteins, into complexes. The RNA targeting effector protein of the invention can for instance be used to target proteins of interest to the RNA origami using a suitable guide RNA.

[0925] These applications could also be applied in animal models for in vivo imaging of disease relevant applications or difficult-to culture cell types.

### Use of RNA-Targeting Effector Protein in RNA Isolation or Purification, Enrichment or Depletion

[0926] It is further envisaging that the RNA targeting effector protein when complexed to RNA can be used to isolate and/or purify the RNA. The RNA targeting effector protein can for instance be fused to an affinity tag that can be used to isolate and/or purify the RNA-RNA targeting effector protein complex. Such applications are for instance useful in the analysis of gene expression profiles in cells.

[0927] In particular embodiments, it can be envisaged that the RNA targeting effector proteins can be used to target a specific noncoding RNA (ncRNA) thereby blocking its activity, providing a useful functional probe. In certain embodiments, the effector protein as described herein may be used to specifically enrich for a particular RNA (including but not limited to increasing stability, etc.), or alternatively to specifically deplete a particular RNA (such as without limitation for instance particular splice variants, isoforms, etc.).

### Interrogation of LincRNA Function and Other Nuclear RNAs

[0928] Current RNA knockdown strategies such as siRNA have the disadvantage that they are mostly limited to targeting cytosolic transcripts since the protein machinery is cytosolic. The advantage of a RNA targeting effector protein of the present invention, an exogenous system that is not essential to cell function, is that it can be used in any compartment in the cell. By fusing a NLS signal to the RNA targeting effector protein, it can be guided to the nucleus, allowing nuclear RNAs to be targeted. It is for instance envisaged to probe the function of lincRNAs. Long intergenic non-coding RNAs (lincRNAs) are a vastly underexplored area of research. Most lincRNAs have as of yet unknown functions which could be studies using the RNA targeting effector protein of the invention.

### Identification of RNA Binding Proteins

[0929] Identifying proteins bound to specific RNAs can be useful for understanding the roles of many RNAs. For instance, many lincRNAs associate with transcriptional and epigenetic regulators to control transcription. Understanding what proteins bind to a given lincRNA can help elucidate the components in a given regulatory pathway. A RNA targeting effector protein of the invention can be designed to recruit a biotin ligase to a specific transcript in order to label locally bound proteins with biotin. The proteins can then be pulled down and analyzed by mass spectrometry to identify them.

### Assembly of Complexes on RNA and Substrate Shuttling

[0930] RNA targeting effector proteins of the invention can further be used to assemble complexes on RNA. This can be achieved by functionalizing the RNA targeting effector protein with multiple related proteins (e.g. components of a particular synthesis pathway). Alternatively, multiple RNA targeting effector proteins can be functionalized with such different related proteins and targeted to the same or adjacent target RNA. Useful application of assembling complexes on RNA are for instance facilitating substrate shuttling between proteins.

### Synthetic Biology

[0931] The development of biological systems has a wide utility, including in clinical applications. It is envisaged that the programmable RNA targeting effector proteins of the invention can be used fused to split proteins of toxic domains for targeted cell death, for instance using cancer-linked RNA as target transcript. Further, pathways involving protein-protein interaction can be influenced in synthetic biological systems with e.g. fusion complexes with the appropriate effectors such as kinases or other enzymes.

### Protein Splicing: Inteins

[0932] Protein splicing is a post-translational process in which an intervening polypeptide, referred to as an intein, catalyzes its own excision from the polypeptides flacking it, referred to as exteins, as well as subsequent ligation of the exteins. The assembly of two or more RNA targeting effector proteins as described herein on a target transcript could be used to direct the release of a split intein (Topilina and Mills Mob DNA. 2014 Feb. 4; 5(1):5), thereby allowing for direct computation of the existence of a mRNA transcript and subsequent release of a protein product, such as a metabolic enzyme or a transcription factor (for downstream actuation of transcription pathways). This application may have significant relevance in synthetic biology (see above) or large-scale bioproduction (only produce product under certain conditions).

### Inducible, Dosed and Self-Inactivating Systems

[0933] In one embodiment, fusion complexes comprising an RNA targeting effector protein of the invention and an effector component are designed to be inducible, for instance light inducible or chemically inducible. Such inducibility allows for activation of the effector component at a desired moment in time.

[0934] Light inducibility is for instance achieved by designing a fusion complex wherein CRY2 PHR/CIBN pairing is used for fusion. This system is particularly useful for light induction of protein interactions in living cells (Konermann S, et al. Nature. 2013; 500:472-476).

[0935] Chemical inducibility is for instance provided for by designing a fusion complex wherein FKBP/FRB (FK506 binding protein/FKBP rapamycin binding) pairing is used for fusion. Using this system rapamycin is required for binding of proteins (Zetsche et al. Nat Biotechnol. 2015; 33(2):139-42 describes the use of this system for Cas9).

[0936] Further, when introduced in the cell as DNA, the RNA targeting effector protein of the inventions can be modulated by inducible promoters, such as tetracycline or doxycycline controlled transcriptional activation (Tet-On and Tet-Off expression system), hormone inducible gene expression system such as for instance an ecdysone inducible gene expression system and an arabinose-inducible gene expression system. When delivered as RNA, expression of the RNA targeting effector protein can be modulated via a riboswitch, which can sense a small molecule like tetracycline (as described in Goldfless et al. Nucleic Acids Res. 2012; 40(9):e64).

[0937] In one embodiment, the delivery of the RNA targeting effector protein of the invention can be modulated to change the amount of protein or crRNA in the cell, thereby changing the magnitude of the desired effect or any undesired off-target effects.

[0938] In one embodiment, the RNA targeting effector proteins described herein can be designed to be self-inactivating. When delivered to a cell as RNA, either mRNA or as a replication RNA therapeutic (Wrobleska et al Nat Biotechnol. 2015 August; 33(8): 839-841), they can self-inactivate expression and subsequent effects by destroying the own RNA, thereby reducing residency and potential undesirable effects.

[0939] For further in vivo applications of RNA targeting effector proteins as described herein, reference is made to Mackay J P et al (Nat Struct Mol Biol. 2011 March; 18(3):256-61), Nelles et al (Bioessays. 2015 July; 37(7):732-9) and Abil Z and Zhao H (Mol Biosyst. 2015 October; 11(10):2658-65), which are incorporated herein by reference. In particular, the following applications are envisaged in certain embodiments of the invention, preferably in certain embodiments by using catalytically inactive CRISPR-Cas: enhancing translation (e.g. CRISPR-Cas-translation promotion factor fusions (e.g. eIF4 fusions)); repressing translation (e.g. gRNA targeting ribosome binding sites); exon skipping (e.g. gRNAs targeting splice donor and/or acceptor sites); exon inclusion (e.g. gRNA targeting a particular exon splice donor and/or acceptor site to be included or CRISPR-Cas fused to or recruiting spliceosome components (e.g. U1 snRNA)); accessing RNA localization (e.g. CRISPR-Cas-marker fusions (e.g. EGFP fusions)); altering RNA localization (e.g. CRISPR-Cas-localization signal fusions (e.g. NLS or NES fusions)); RNA degradation (in this case no catalytically inactive CRISPR-Cas is to be used if relied on the activity of CRISPR-Cas, alternatively and for increased specificity, a split CRISPR-Cas may be used); inhibition of non-coding RNA function (e.g. miRNA), such as by degradation or binding of gRNA to functional sites (possibly titrating out at specific sites by relocalization by CRISPR-Cas-signal sequence fusions).

[0940] As described herein before and demonstrated in the Examples, CRISPR-Cas function is robust to 5′ or 3′ extensions of the crRNA and to extension of the crRNA loop. It is therefore envisaging that MS2 loops and other recruitment domains can be added to the crRNA without affecting complex formation and binding to target transcripts. Such modifications to the crRNA for recruitment of various effector domains are applicable in the uses of a RNA targeted effector proteins described above.

[0941] CRISPR-Cas is capable of mediating resistance to RNA phages. It is therefore envisaged that CRISPR-Cas can be used to immunize, e.g. animals, humans and plants, against RNA-only pathogens, including but not limited to Ebola virus and Zika virus.

[0942] In certain embodiments, CRISPR-Cas can process (cleave) its own array. This applies to both the wildtype CRISPR-Cas protein and the mutated CRISPR-Cas protein containing one or more mutated amino acid residues as herein-discussed. It is therefore envisaged that multiple crRNAs designed for different target transcripts and/or applications can be delivered as a single pre-crRNA or as a single transcript driven by one promotor. Such method of delivery has the advantages that it is substantially more compact, easier to synthesize and easier to delivery in viral systems. It will be understood that exact amino acid positions may vary for orthologues of a herein CRISPR-Cas can be adequately determined by protein alignment, as is known in the art, and as described herein elsewhere. Aspects of the invention also encompass methods and uses of the compositions and systems described herein in genome engineering, e.g. for altering or manipulating the expression of one or more genes or the one or more gene products, in prokaryotic or eukaryotic cells, in vitro, in vivo or ex vivo.

[0943] In an aspect, the invention provides methods and compositions for modulating, e.g., reducing, expression of a target RNA in cells. In the subject methods, a CRISPR-Cas system of the invention is provided that interferes with transcription, stability, and/or translation of an RNA.

[0944] In certain embodiments, an effective amount of CRISPR-Cas system is used to cleave RNA or otherwise inhibit RNA expression. In this regard, the system has uses similar to siRNA and shRNA, thus can also be substituted for such methods. The method includes, without limitation, use of a CRISPR-Cas system as a substitute for e.g., an interfering ribonucleic acid (such as an siRNA or shRNA) or a transcription template thereof, e.g., a DNA encoding an shRNA. The CRISPR-Cas system is introduced into a target cell, e.g., by being administered to a mammal that includes the target cell.

[0945] Advantageously, a CRISPR-Cas system of the invention is specific. For example, whereas interfering ribonucleic acid (such as an siRNA or shRNA) polynucleotide systems are plagued by design and stability issues and off-target binding, a CRISPR-Cas system of the invention can be designed with high specificity.

[0946] In an aspect of the invention, novel RNA targeting systems also referred to as RNA- or RNA-targeting CRISPR systems of the present application are based on herein-identified CRISPR-Cas proteins which do not require the generation of customized proteins to target specific RNA sequences but rather a single enzyme can be programmed by a RNA molecule to recognize a specific RNA target, in other words the enzyme can be recruited to a specific RNA target using said RNA molecule.

[0947] In some embodiments, one or more elements of a nucleic acid-targeting system is derived from a particular organism comprising an endogenous CRISPR RNA-targeting system. In certain embodiments, the CRISPR RNA-targeting system is found in Eubacterium and Ruminococcus. In certain embodiments, the effector protein comprises targeted and collateral ssRNA cleavage activity. In certain embodiments, the effector protein comprises dual HEPN domains. In certain embodiments, the effector protein lacks a counterpart to the Helical-1 domain of Cas13a. In certain embodiments, the effector protein is smaller than previously characterized class 2 CRISPR effectors, with a median size of 928 aa. This median size is 190 aa (17%) less than that of Cas13c, more than 200 aa (18%) less than that of Cas13b, and more than 300 aa (26%) less than that of Cas13a. In certain embodiments, the effector protein has no requirement for a flanking sequence (e.g., PFS, PAM).

[0948] In certain embodiments, the effector protein locus structures include a WYL domain containing accessory protein (so denoted after three amino acids that were conserved in the originally identified group of these domains; see, e.g., WYL domain IPR026881). In certain embodiments, the WYL domain accessory protein comprises at least one helix-turn-helix (HTH) or ribbon-helix-helix (RHH) DNA-binding domain. In certain embodiments, the WYL domain containing accessory protein increases both the targeted and the collateral ssRNA cleavage activity of the RNA-targeting effector protein. In certain embodiments, the WYL domain containing accessory protein comprises an N-terminal RHH domain, as well as a pattern of primarily hydrophobic conserved residues, including an invariant tyrosine-leucine doublet corresponding to the original WYL motif. In certain embodiments, the WYL domain containing accessory protein is WYL1. WYL1 is a single WYL-domain protein associated primarily with Ruminococcus.

[0949] In other example embodiments, the Type VI RNA-targeting Cas enzyme is Cas 13d. In certain embodiments, Cas13d is Eubacterium siraeum DSM 15702 (EsCas13d) or Ruminococcus sp. N15.MGS-57 (RspCas13d) (see, e.g., Yan et al., Cas13d Is a Compact RNA-Targeting Type VI CRISPR Effector Positively Modulated by a WYL-Domain-Containing Accessory Protein, Molecular Cell (2018), doi. org/10.1016/j.molcel.2018.02.028). RspCas13d and EsCas13d have no flanking sequence requirements (e.g., PFS, PAM).

### Application of the CRISPR-Cas Proteins in Optimized Functional RNA Targeting Systems

[0950] In an aspect the invention provides a system for specific delivery of functional components to the RNA environment. This can be ensured using the CRISPR systems comprising the RNA targeting effector proteins of the present invention which allow specific targeting of different components to RNA. More particularly such components include activators or repressors, such as activators or repressors of RNA translation, degradation, etc. Applications of this system are described elsewhere herein.

[0951] According to one aspect the invention provides non-naturally occurring or engineered composition comprising a guide RNA comprising a guide sequence capable of hybridizing to a target sequence in a genomic locus of interest in a cell, wherein the guide RNA is modified by the insertion of one or more distinct RNA sequence(s) that bind an adaptor protein. In particular embodiments, the RNA sequences may bind to two or more adaptor proteins (e.g. aptamers), and wherein each adaptor protein is associated with one or more functional domains. The guide RNAs of the CRISPR-Cas enzymes described herein are shown to be amenable to modification of the guide sequence. In particular embodiments, the guide RNA is modified by the insertion of distinct RNA sequence(s) 5′ of the direct repeat, within the direct repeat, or 3′ of the guide sequence. When there is more than one functional domain, the functional domains can be same or different, e.g., two of the same or two different activators or repressors. In an aspect the invention provides a herein-discussed composition, wherein the one or more functional domains are attached to the RNA targeting enzyme so that upon binding to the target RNA the functional domain is in a spatial orientation allowing for the functional domain to function in its attributed function; In an aspect the invention provides a herein-discussed composition, wherein the composition comprises a CRISPR-Cas complex having at least three functional domains, at least one of which is associated with the RNA targeting enzyme and at least two of which are associated with the gRNA.

[0952] Accordingly, in an aspect the invention provides non-naturally occurring or engineered CRISPR-Cas complex composition comprising the guide RNA as herein-discussed and a CRISPR-Cas which is an RNA targeting enzyme, wherein optionally the RNA targeting enzyme comprises at least one mutation, such that the RNA targeting enzyme has no more than 5% of the nuclease activity of the enzyme not having the at least one mutation, and optionally one or more comprising at least one or more nuclear localization sequences. In particular embodiments, the guide RNA is additionally or alternatively modified so as to still ensure binding of the RNA targeting enzyme but to prevent cleavage by the RNA targeting enzyme (as detailed elsewhere herein).

[0953] In particular embodiments, the RNA targeting enzyme is a CRISPR-Cas protein which has a diminished nuclease activity of at least 97%, or 100% as compared with the CRISPR-Cas enzyme not having the at least one mutation. In an aspect the invention provides a herein-discussed composition, wherein the CRISPR-Cas enzyme comprises two or more mutations as otherwise herein-discussed.

[0954] In particular embodiments, an RNA targeting system is provided as described herein above comprising two or more functional domains. In particular embodiments, the two or more functional domains are heterologous functional domain. In particular embodiments, the system comprises an adaptor protein which is a fusion protein comprising a functional domain, the fusion protein optionally comprising a linker between the adaptor protein and the functional domain. In particular embodiments, the linker includes a GlySer linker. Additionally or alternatively, one or more functional domains are attached to the RNA effector protein by way of a linker, optionally a GlySer linker. In particular embodiments, the one or more functional domains are attached to the RNA targeting enzyme through one or both of the HEPN domains.

[0955] In an aspect the invention provides a herein-discussed composition, wherein the one or more functional domains associated with the adaptor protein or the RNA targeting enzyme is a domain capable of activating or repressing RNA translation. In an aspect the invention provides a herein-discussed composition, wherein at least one of the one or more functional domains associated with the adaptor protein have one or more activities comprising methylase activity, demethylase activity, transcription activation activity, transcription repression activity, transcription release factor activity, histone modification activity, DNA integration activity RNA cleavage activity, DNA cleavage activity or nucleic acid binding activity, or molecular switch activity or chemical inducibility or light inducibility.

[0956] In an aspect the invention provides a herein-discussed composition comprising an aptamer sequence. In particular embodiments, the aptamer sequence is two or more aptamer sequences specific to the same adaptor protein. In an aspect the invention provides a herein-discussed composition, wherein the aptamer sequence is two or more aptamer sequences specific to different adaptor protein. In an aspect the invention provides a herein-discussed composition, wherein the adaptor protein comprises MS2, PP7, Qβ, F2, GA, fr, JP501, M12, R17, BZ13, JP34, JP500, KU1, M11, MX1, TW18, VK, SP, FI, ID2, NL95, TW19, AP205, ϕCb5, ϕCb8r, ϕCb12r, ϕCb23r, 7s, PRR1. Accordingly, in particular embodiments, the aptamer is selected from a binding protein specifically binding any one of the adaptor proteins listed above. In an aspect the invention provides a herein-discussed composition, wherein the cell is a eukaryotic cell. In an aspect the invention provides a herein-discussed composition, wherein the eukaryotic cell is a mammalian cell, a plant cell or a yeast cell, whereby the mammalian cell is optionally a mouse cell. In an aspect the invention provides a herein-discussed composition, wherein the mammalian cell is a human cell.

[0957] In an aspect the invention provides a herein above-discussed composition wherein there is more than one guide RNA or gRNA or crRNA, and these target different sequences whereby when the composition is employed, there is multiplexing. In an aspect the invention provides a composition wherein there is more than one guide RNA or gRNA or crRNA modified by the insertion of distinct RNA sequence(s) that bind to one or more adaptor proteins.

[0958] In an aspect the invention provides a herein-discussed composition wherein one or more adaptor proteins associated with one or more functional domains is present and bound to the distinct RNA sequence(s) inserted into the guide RNA(s).

[0959] In an aspect the invention provides a herein-discussed composition wherein the guide RNA is modified to have at least one non-coding functional loop; e.g., wherein the at least one non-coding functional loop is repressive; for instance, wherein at least one non-coding functional loop comprises Alu.

[0960] In an aspect the invention provides a method for modifying gene expression comprising the administration to a host or expression in a host in vivo of one or more of the compositions as herein-discussed.

[0961] In an aspect the invention provides a herein-discussed method comprising the delivery of the composition or nucleic acid molecule(s) coding therefor, wherein said nucleic acid molecule(s) are operatively linked to regulatory sequence(s) and expressed in vivo. In an aspect the invention provides a herein-discussed method wherein the expression in vivo is via a lentivirus, an adenovirus, or an AAV.

[0962] In an aspect the invention provides a mammalian cell line of cells as herein-discussed, wherein the cell line is, optionally, a human cell line or a mouse cell line. In an aspect the invention provides a transgenic mammalian model, optionally a mouse, wherein the model has been transformed with a herein-discussed composition or is a progeny of said transformant.

[0963] In an aspect the invention provides a nucleic acid molecule(s) encoding guide RNA or the RNA targeting CRISPR-Cas complex or the composition as herein-discussed. In an aspect the invention provides a vector comprising: a nucleic acid molecule encoding a guide RNA (gRNA) or crRNA comprising a guide sequence capable of hybridizing to an RNA target sequence in a cell, wherein the direct repeat of the gRNA or crRNA is modified by the insertion of distinct RNA sequence(s) that bind(s) to two or more adaptor proteins, and wherein each adaptor protein is associated with one or more functional domains; or, wherein the gRNA is modified to have at least one non-coding functional loop. In an aspect the invention provides vector(s) comprising nucleic acid molecule(s) encoding: non-naturally occurring or engineered CRISPR-Cas complex composition comprising the gRNA or crRNA herein-discussed, and an RNA targeting enzyme, wherein optionally the RNA targeting enzyme comprises at least one mutation, such that the RNA targeting enzyme has no more than 5% of the nuclease activity of the RNA targeting enzyme not having the at least one mutation, and optionally one or more comprising at least one or more nuclear localization sequences. In an aspect a vector can further comprise regulatory element(s) operable in a eukaryotic cell operably linked to the nucleic acid molecule encoding the guide RNA (gRNA) or crRNA and/or the nucleic acid molecule encoding the RNA targeting enzyme and/or the optional nuclear localization sequence(s).

[0964] In one aspect, the invention provides a kit comprising one or more of the components described herein. In some embodiments, the kit comprises a vector system as described herein and instructions for using the kit.

[0965] In an aspect the invention provides a method of screening for gain of function (GOF) or loss of function (LOF) or for screening non-coding RNAs or potential regulatory regions (e.g. enhancers, repressors) comprising the cell line of as herein-discussed or cells of the model herein-discussed containing or expressing the RNA targeting enzyme and introducing a composition as herein-discussed into cells of the cell line or model, whereby the gRNA or crRNA includes either an activator or a repressor, and monitoring for GOF or LOF respectively as to those cells as to which the introduced gRNA or crRNA includes an activator or as to those cells as to which the introduced gRNA or crRNA includes a repressor.

[0966] In an aspect the invention provides a library of non-naturally occurring or engineered compositions, each comprising a RNA targeting CRISPR guide RNA (gRNA) or crRNA comprising a guide sequence capable of hybridizing to a target RNA sequence of interest in a cell, an RNA targeting enzyme, wherein the RNA targeting enzyme comprises at least one mutation, such that the RNA targeting enzyme has no more than 5% of the nuclease activity of the RNA targeting enzyme not having the at least one mutation, wherein the gRNA or crRNA is modified by the insertion of distinct RNA sequence(s) that bind to one or more adaptor proteins, and wherein the adaptor protein is associated with one or more functional domains, wherein the composition comprises one or more or two or more adaptor proteins, wherein the each protein is associated with one or more functional domains, and wherein the gRNAs or crRNAs comprise a genome wide library comprising a plurality of RNA targeting guide RNAs (gRNAs) or crRNAs. In an aspect the invention provides a library as herein-discussed, wherein the RNA targeting RNA targeting enzyme has a diminished nuclease activity of at least 97%, or 100% as compare with the RNA targeting enzyme not having the at least one mutation. In an aspect the invention provides a library as herein-discussed, wherein the adaptor protein is a fusion protein comprising the functional domain. In an aspect the invention provides a library as herein discussed, wherein the gRNA or crRNA is not modified by the insertion of distinct RNA sequence(s) that bind to the one or two or more adaptor proteins. In an aspect the invention provides a library as herein discussed, wherein the one or two or more functional domains are associated with the RNA targeting enzyme. In an aspect the invention provides a library as herein discussed, wherein the cell population of cells is a population of eukaryotic cells. In an aspect the invention provides a library as herein discussed, wherein the eukaryotic cell is a mammalian cell, a plant cell or a yeast cell. In an aspect the invention provides a library as herein discussed, wherein the mammalian cell is a human cell. In an aspect the invention provides a library as herein discussed, wherein the population of cells is a population of embryonic stem (ES) cells.

[0967] In an aspect the invention provides a library as herein discussed, wherein the targeting is of about 100 or more RNA sequences. In an aspect the invention provides a library as herein discussed, wherein the targeting is of about 1000 or more RNA sequences. In an aspect the invention provides a library as herein discussed, wherein the targeting is of about 20,000 or more sequences. In an aspect the invention provides a library as herein discussed, wherein the targeting is of the entire transcriptome. In an aspect the invention provides a library as herein discussed, wherein the targeting is of a panel of target sequences focused on a relevant or desirable pathway. In an aspect the invention provides a library as herein discussed, wherein the pathway is an immune pathway. In an aspect the invention provides a library as herein discussed, wherein the pathway is a cell division pathway.

[0968] In one aspect, the invention provides a method of generating a model eukaryotic cell comprising a gene with modified expression. In some embodiments, a disease gene is any gene associated an increase in the risk of having or developing a disease. In some embodiments, the method comprises (a) introducing one or more vectors encoding the components of the system described herein above into a eukaryotic cell, and (b) allowing a CRISPR complex to bind to a target polynucleotide so as to modify expression of a gene, thereby generating a model eukaryotic cell comprising modified gene expression.

[0969] The structural information provided herein allows for interrogation of guide RNA or crRNA interaction with the target RNA and the RNA targeting enzyme permitting engineering or alteration of guide RNA structure to optimize functionality of the entire RNA targeting CRISPR-Cas system. For example, the guide RNA or crRNA may be extended, without colliding with the RNA targeting protein by the insertion of adaptor proteins that can bind to RNA. These adaptor proteins can further recruit effector proteins or fusions which comprise one or more functional domains.

[0970] An aspect of the invention is that the above elements are comprised in a single composition or comprised in individual compositions. These compositions may advantageously be applied to a host to elicit a functional effect on the genomic level.

[0971] The skilled person will understand that modifications to the guide RNA or crRNA which allow for binding of the adapter+functional domain but not proper positioning of the adapter+functional domain (e.g. due to steric hindrance within the three dimension structure of the CRISPR-Cas complex) are modifications which are not intended. The one or more modified guide RNA or crRNA may be modified, by introduction of a distinct RNA sequence(s) 5′ of the direct repeat, within the direct repeat, or 3′ of the guide sequence.

[0972] The modified guide RNA or crRNA, the inactivated RNA targeting enzyme (with or without functional domains), and the binding protein with one or more functional domains, may each individually be comprised in a composition and administered to a host individually or collectively. Alternatively, these components may be provided in a single composition for administration to a host. Administration to a host may be performed via viral vectors known to the skilled person or described herein for delivery to a host (e.g. lentiviral vector, adenoviral vector, AAV vector). As explained herein, use of different selection markers (e.g. for lentiviral gRNA or crRNA selection) and concentration of gRNA or crRNA (e.g. dependent on whether multiple gRNAs or crRNAs are used) may be advantageous for eliciting an improved effect.

[0973] Using the provided compositions, the person skilled in the art can advantageously and specifically target single or multiple loci with the same or different functional domains to elicit one or more genomic events. The compositions may be applied in a wide variety of methods for screening in libraries in cells and functional modeling in vivo (e.g. gene activation of lincRNA and identification of function; gain-of-function modeling; loss-of-function modeling; the use the compositions of the invention to establish cell lines and transgenic animals for optimization and screening purposes).

[0974] The current invention comprehends the use of the compositions of the current invention to establish and utilize conditional or inducible CRISPR-Cas RNA targeting events. (See, e.g., Platt et al., Cell (2014), dx.doi.org/10.1016/j.cell.2014.09.014, or PCT patent publications cited herein, such as WO 2014/093622 (PCT/US2013/074667), which are not believed prior to the present invention or application).

### Delivery of Functional Effectors

[0975] CRISPR-Cas13 knockdown allows for temporary reduction of gene expression through the use of artificial transcription factors, e.g., via mutating residues in cleavage domain(s) of the Cas13 protein results in the generation of a catalytically inactive Cas13 protein. A catalytically inactive Cas13 complexes with a guide RNA or crRNA and localizes to the RNA sequence specified by that guide RNA's or crRNA's targeting domain, however, it does not cleave the target. Fusion of the inactive Cas13 protein to an effector domain, e.g., a transcription repression domain, enables recruitment of the effector to any site specified by the guide RNA.

### Optimized Functional RNA Targeting Systems

[0976] In an aspect the invention thus provides a system for specific delivery of functional components to the RNA environment. This can be ensured using the CRISPR systems comprising the RNA targeting effector proteins of the present invention which allow specific targeting of different components to RNA. More particularly such components include activators or repressors, such as activators or repressors of RNA translation, degradation, etc.

[0977] According to one aspect the invention provides non-naturally occurring or engineered composition comprising a guide RNA or crRNA comprising a guide sequence capable of hybridizing to a target sequence of interest in a cell, wherein the guide RNA or crRNA is modified by the insertion of one or more distinct RNA sequence(s) that bind an adaptor protein. In particular embodiments, the RNA sequences may bind to two or more adaptor proteins (e.g. aptamers), and wherein each adaptor protein is associated with one or more functional domains. When there is more than one functional domain, the functional domains can be same or different, e.g., two of the same or two different activators or repressors. In an aspect the invention provides a herein-discussed composition, wherein the one or more functional domains are attached to the RNA targeting enzyme so that upon binding to the target RNA the functional domain is in a spatial orientation allowing for the functional domain to function in its attributed function; In an aspect the invention provides a herein-discussed composition, wherein the composition comprises a CRISPR-Cas13 complex having at least three functional domains, at least one of which is associated with the RNA targeting enzyme and at least two of which are associated with the gRNA or crRNA.

### Application of RNA Targeting-CRISPR System to Plants and Yeast Definitions:

[0978] In general, the term “plant” relates to any various photosynthetic, eukaryotic, unicellular or multicellular organism of the kingdom Plantae characteristically growing by cell division, containing chloroplasts, and having cell walls comprised of cellulose. The term plant encompasses monocotyledonous and dicotyledonous plants. Specifically, the plants are intended to comprise without limitation angiosperm and gymnosperm plants such as acacia, alfalfa, amaranth, apple, apricot, artichoke, ash tree, asparagus, avocado, banana, barley, beans, beet, birch, beech, blackberry, blueberry, broccoli, Brussel's sprouts, cabbage, canola, cantaloupe, carrot, cassava, cauliflower, cedar, a cereal, celery, chestnut, cherry, Chinese cabbage, citrus, clementine, clover, coffee, corn, cotton, cowpea, cucumber, cypress, eggplant, elm, endive, eucalyptus, fennel, figs, fir, geranium, grape, grapefruit, groundnuts, ground cherry, gum hemlock, hickory, kale, kiwifruit, kohlrabi, larch, lettuce, leek, lemon, lime, locust, pine, maidenhair, maize, mango, maple, melon, millet, mushroom, mustard, nuts, oak, oats, oil palm, okra, onion, orange, an ornamental plant or flower or tree, papaya, palm, parsley, parsnip, pea, peach, peanut, pear, peat, pepper, persimmon, pigeon pea, pine, pineapple, plantain, plum, pomegranate, potato, pumpkin, radicchio, radish, rapeseed, raspberry, rice, rye, sorghum, safflower, sallow, soybean, spinach, spruce, squash, strawberry, sugar beet, sugarcane, sunflower, sweet potato, sweet corn, tangerine, tea, tobacco, tomato, trees, triticale, turf grasses, turnips, vine, walnut, watercress, watermelon, wheat, yams, yew, and zucchini. The term plant also encompasses Algae, which are mainly photoautotrophs unified primarily by their lack of roots, leaves and other organs that characterize higher plants.

[0979] The methods for modulating gene expression using the RNA targeting system as described herein can be used to confer desired traits on essentially any plant. A wide variety of plants and plant cell systems may be engineered for the desired physiological and agronomic characteristics described herein using the nucleic acid constructs of the present disclosure and the various transformation methods mentioned above. In preferred embodiments, target plants and plant cells for engineering include, but are not limited to, those monocotyledonous and dicotyledonous plants, such as crops including grain crops (e.g., wheat, maize, rice, millet, barley), fruit crops (e.g., tomato, apple, pear, strawberry, orange), forage crops (e.g., alfalfa), root vegetable crops (e.g., carrot, potato, sugar beets, yam), leafy vegetable crops (e.g., lettuce, spinach); flowering plants (e.g., petunia, rose, chrysanthemum), conifers and pine trees (e.g., pine fir, spruce); plants used in phytoremediation (e.g., heavy metal accumulating plants); oil crops (e.g., sunflower, rape seed) and plants used for experimental purposes (e.g., Arabidopsis). Thus, the methods and CRISPR-Cas systems can be used over a broad range of plants, such as for example with dicotyledonous plants belonging to the orders Magniolales, Illiciales, Laurales, Piperales, Aristochiales, Nymphaeales, Ranunculales, Papeverales, Sarraceniaceae, Trochodendrales, Hamamelidales, Eucomiales, Leitneriales, Myricales, Fagales, Casuarinales, Caryophyllales, Batales, Polygonales, Plumbaginales, Dilleniales, Theales, Malvales, Urticales, Lecythidales, Violales, Salicales, Capparales, Ericales, Diapensales, Ebenales, Primulales, Rosales, Fabales, Podostemales, Haloragales, Myrtales, Cornales, Proteales, San tales, Rafflesiales, Celastrales, Euphorbiales, Rhamnales, Sapindales, Juglandales, Geraniales, Polygalales, Umbellales, Gentianales, Polemoniales, Lamiales, Plantaginales, Scrophulariales, Campanulales, Rubiales, Dipsacales, and Asterales; the methods and CRISPR-Cas systems can be used with monocotyledonous plants such as those belonging to the orders Alismatales, Hydrocharitales, Najadales, Triuridales, Commelinales, Eriocaulales, Restionales, Poales, Juncales, Cyperales, Typhales, Bromeliales, Zingiberales, Arecales, Cyclanthales, Pandanales, Arales, Lilliales, and Orchid ales, or with plants belonging to Gymnospermae, e.g those belonging to the orders Pinales, Ginkgoales, Cycadales, Araucariales, Cupressales and Gnetales.

[0980] The RNA targeting CRISPR systems and methods of use described herein can be used over a broad range of plant species, included in the non-limitative list of dicot, monocot or gymnosperm genera hereunder: Atropa, Alseodaphne, Anacardium, Arachis, Beilschmiedia, Brassica, Carthamus, Cocculus, Croton, Cucumis, Citrus, Citrullus, Capsicum, Catharanthus, Cocos, Coffea, Cucurbita, Daucus, Duguetia, Eschscholzia, Ficus, Fragaria, Glaucium, Glycine, Gossypium, Helianthus, Hevea, Hyoscyamus, Lactuca, Landolphia, Linum, Litsea, Lycopersicon, Lupinus, Manihot, Majorana, Malus, Medicago, Nicotiana, Olea, Parthenium, Papaver, Persea, Phaseolus, Pistacia, Pisum, Pyrus, Prunus, Raphanus, Ricinus, Senecio, Sinomenium, Stephania, Sinapis, Solanum, Theobroma, Trifolium, Trigonella, Vicia, Vinca, Vilis, and Vigna; and the genera Allium, Andropogon, Aragrostis, Asparagus, Avena, Cynodon, Elaeis, Festuca, Festulolium, Heterocallis, Hordeum, Lemna, Lolium, Musa, Oryza, Panicum, Pannesetum, Phleum, Poa, Secale, Sorghum, Triticum, Zea, Abies, Cunninghamia, Ephedra, Picea, Pinus, and Pseudotsuga.

[0981] The RNA targeting CRISPR systems and methods of use can also be used over a broad range of “algae” or “algae cells”; including for example algae selected from several eukaryotic phyla, including the Rhodophyta (red algae), Chlorophyta (green algae), Phaeophyta (brown algae), Bacillariophyta (diatoms), Eustigmatophyta and dinoflagellates as well as the prokaryotic phylum Cyanobacteria (blue-green algae). The term “algae” includes for example algae selected from: Amphora, Anabaena, Anikstrodesmis, Botryococcus, Chaetoceros, Chlamydomonas, Chlorella, Chlorococcum, Cyclotella, Cylindrotheca, Dunaliella, Emiliana, Euglena, Hematococcus, Isochrysis, Monochrysis, Monoraphidium, Nannochloris, Nannnochloropsis, Navicula, Nephrochloris, Nephroselmis, Nitzschia, Nodularia, Nostoc, Oochromonas, Oocystis, Oscillartoria, Pavlova, Phaeodactylum, Playtmonas, Pleurochrysis, Porhyra, Pseudoanabaena, Pyramimonas, Stichococcus, Synechococcus, Synechocystis, Tetraselmis, Thalassiosira, and Trichodesmium.

[0982] A part of a plant, i.e., a “plant tissue” may be treated according to the methods of the present invention to produce an improved plant. Plant tissue also encompasses plant cells. The term “plant cell” as used herein refers to individual units of a living plant, either in an intact whole plant or in an isolated form grown in in vitro tissue cultures, on media or agar, in suspension in a growth media or buffer or as a part of higher organized unites, such as, for example, plant tissue, a plant organ, or a whole plant.

[0983] A “protoplast” refers to a plant cell that has had its protective cell wall completely or partially removed using, for example, mechanical or enzymatic means resulting in an intact biochemical competent unit of living plant that can reform their cell wall, proliferate and regenerate grow into a whole plant under proper growing conditions.

[0984] The term “transformation” broadly refers to the process by which a plant host is genetically modified by the introduction of DNA by means of Agrobacteria or one of a variety of chemical or physical methods. As used herein, the term “plant host” refers to plants, including any cells, tissues, organs, or progeny of the plants. Many suitable plant tissues or plant cells can be transformed and include, but are not limited to, protoplasts, somatic embryos, pollen, leaves, seedlings, stems, calli, stolons, microtubers, and shoots. A plant tissue also refers to any clone of such a plant, seed, progeny, propagule whether generated sexually or asexually, and descendants of any of these, such as cuttings or seed.

[0985] The term “transformed” as used herein, refers to a cell, tissue, organ, or organism into which a foreign DNA molecule, such as a construct, has been introduced. The introduced DNA molecule may be integrated into the genomic DNA of the recipient cell, tissue, organ, or organism such that the introduced DNA molecule is transmitted to the subsequent progeny. In these embodiments, the “transformed” or “transgenic” cell or plant may also include progeny of the cell or plant and progeny produced from a breeding program employing such a transformed plant as a parent in a cross and exhibiting an altered phenotype resulting from the presence of the introduced DNA molecule. Preferably, the transgenic plant is fertile and capable of transmitting the introduced DNA to progeny through sexual reproduction.

[0986] The term “progeny”, such as the progeny of a transgenic plant, is one that is born of, begotten by, or derived from a plant or the transgenic plant. The introduced DNA molecule may also be transiently introduced into the recipient cell such that the introduced DNA molecule is not inherited by subsequent progeny and thus not considered “transgenic”. Accordingly, as used herein, a “non-transgenic” plant or plant cell is a plant which does not contain a foreign DNA stably integrated into its genome.

[0987] The term “plant promoter” as used herein is a promoter capable of initiating transcription in plant cells, whether or not its origin is a plant cell. Exemplary suitable plant promoters include, but are not limited to, those that are obtained from plants, plant viruses, and bacteria such as Agrobacterium or Rhizobium which comprise genes expressed in plant cells.

[0988] As used herein, a “fungal cell” refers to any type of eukaryotic cell within the kingdom of fungi. Phyla within the kingdom of fungi include Ascomycota, Basidiomycota, Blastocladiomycota, Chytridiomycota, Glomeromycota, Microsporidia, and Neocallimastigomycota. Fungal cells may include yeasts, molds, and filamentous fungi. In some embodiments, the fungal cell is a yeast cell.

[0989] As used herein, the term “yeast cell” refers to any fungal cell within the phyla Ascomycota and Basidiomycota. Yeast cells may include budding yeast cells, fission yeast cells, and mold cells. Without being limited to these organisms, many types of yeast used in laboratory and industrial settings are part of the phylum Ascomycota. In some embodiments, the yeast cell is an S. cerervisiae, Kluyveromyces marxianus, or Issatchenkia orientalis cell. Other yeast cells may include without limitation Candida spp. (e.g., Candida albicans), Yarrowia spp. (e.g., Yarrowia lipolytica), Pichia spp. (e.g., Pichia pastoris), Kluyveromyces spp. (e.g., Kluyveromyces lactis and Kluyveromyces marxianus), Neurospora spp. (e.g., Neurospora crassa), Fusarium spp. (e.g., Fusarium oxysporum), and Issatchenkia spp. (e.g., Issatchenkia orientalis, a.k.a. Pichia kudriavzevii and Candida acidothermophilum). In some embodiments, the fungal cell is a filamentous fungal cell. As used herein, the term “filamentous fungal cell” refers to any type of fungal cell that grows in filaments, i.e., hyphae or mycelia. Examples of filamentous fungal cells may include without limitation Aspergillus spp. (e.g., Aspergillus niger), Trichoderma spp. (e.g., Trichoderma reesei), Rhizopus spp. (e.g., Rhizopus oryzae), and Mortierella spp. (e.g., Mortierella isabellina).

[0990] In some embodiments, the fungal cell is an industrial strain. As used herein, “industrial strain” refers to any strain of fungal cell used in or isolated from an industrial process, e.g., production of a product on a commercial or industrial scale. Industrial strain may refer to a fungal species that is typically used in an industrial process, or it may refer to an isolate of a fungal species that may be also used for non-industrial purposes (e.g., laboratory research). Examples of industrial processes may include fermentation (e.g., in production of food or beverage products), distillation, biofuel production, production of a compound, and production of a polypeptide. Examples of industrial strains may include, without limitation, JAY270 and ATCC4124.

[0991] In some embodiments, the fungal cell is a polyploid cell. As used herein, a “polyploid” cell may refer to any cell whose genome is present in more than one copy. A polyploid cell may refer to a type of cell that is naturally found in a polyploid state, or it may refer to a cell that has been induced to exist in a polyploid state (e.g., through specific regulation, alteration, inactivation, activation, or modification of meiosis, cytokinesis, or DNA replication). A polyploid cell may refer to a cell whose entire genome is polyploid, or it may refer to a cell that is polyploid in a particular genomic locus of interest. Without wishing to be bound to theory, it is thought that the abundance of guide RNA may more often be a rate-limiting component in genome engineering of polyploid cells than in haploid cells, and thus the methods using the CRISPR-Cas CRISPR system described herein may take advantage of using a certain fungal cell type.

[0992] In some embodiments, the fungal cell is a diploid cell. As used herein, a “diploid” cell may refer to any cell whose genome is present in two copies. A diploid cell may refer to a type of cell that is naturally found in a diploid state, or it may refer to a cell that has been induced to exist in a diploid state (e.g., through specific regulation, alteration, inactivation, activation, or modification of meiosis, cytokinesis, or DNA replication). For example, the S. cerevisiae strain S228C may be maintained in a haploid or diploid state. A diploid cell may refer to a cell whose entire genome is diploid, or it may refer to a cell that is diploid in a particular genomic locus of interest. In some embodiments, the fungal cell is a haploid cell. As used herein, a “haploid” cell may refer to any cell whose genome is present in one copy. A haploid cell may refer to a type of cell that is naturally found in a haploid state, or it may refer to a cell that has been induced to exist in a haploid state (e.g., through specific regulation, alteration, inactivation, activation, or modification of meiosis, cytokinesis, or DNA replication). For example, the S. cerevisiae strain S228C may be maintained in a haploid or diploid state. A haploid cell may refer to a cell whose entire genome is haploid, or it may refer to a cell that is haploid in a particular genomic locus of interest.

[0993] As used herein, a “yeast expression vector” refers to a nucleic acid that contains one or more sequences encoding an RNA and/or polypeptide and may further contain any desired elements that control the expression of the nucleic acid(s), as well as any elements that enable the replication and maintenance of the expression vector inside the yeast cell. Many suitable yeast expression vectors and features thereof are known in the art; for example, various vectors and techniques are illustrated in in Yeast Protocols, 2nd edition, Xiao, W., ed. (Humana Press, New York, 2007) and Buckholz, R. G. and Gleeson, M.A. (1991) Biotechnology (NY) 9(11): 1067-72. Yeast vectors may contain, without limitation, a centromeric (CEN) sequence, an autonomous replication sequence (ARS), a promoter, such as an RNA Polymerase III promoter, operably linked to a sequence or gene of interest, a terminator such as an RNA polymerase III terminator, an origin of replication, and a marker gene (e.g., auxotrophic, antibiotic, or other selectable markers). Examples of expression vectors for use in yeast may include plasmids, yeast artificial chromosomes, 2μ plasmids, yeast integrative plasmids, yeast replicative plasmids, shuttle vectors, and episomal plasmids.

### Stable Integration of RNA Targeting Crisp System Components in the Genome of Plants and Plant Cells

[0994] In particular embodiments, it is envisaged that the polynucleotides encoding the components of the RNA targeting CRISPR system are introduced for stable integration into the genome of a plant cell. In these embodiments, the design of the transformation vector or the expression system can be adjusted depending on when, where and under what conditions the guide RNA and/or the RNA targeting gene(s) are expressed.

[0995] In particular embodiments, it is envisaged to introduce the components of the RNA targeting CRISPR system stably into the genomic DNA of a plant cell. Additionally or alternatively, it is envisaged to introduce the components of the RNA targeting CRISPR system for stable integration into the DNA of a plant organelle such as, but not limited to a plastid, e mitochondrion or a chloroplast.

[0996] The expression system for stable integration into the genome of a plant cell may contain one or more of the following elements: a promoter element that can be used to express the guide RNA and/or RNA targeting enzyme in a plant cell; a 5′ untranslated region to enhance expression; an intron element to further enhance expression in certain cells, such as monocot cells; a multiple-cloning site to provide convenient restriction sites for inserting the one or more guide RNAs and/or the RNA targeting gene sequences and other desired elements; and a 3′ untranslated region to provide for efficient termination of the expressed transcript.

[0997] The elements of the expression system may be on one or more expression constructs which are either circular such as a plasmid or transformation vector, or non-circular such as linear double stranded DNA.

[0998] In a particular embodiment, a RNA targeting CRISPR expression system comprises at least:
[0999] (a) a nucleotide sequence encoding a guide RNA (gRNA) that hybridizes with a target sequence in a plant, and wherein the guide RNA comprises a guide sequence and a direct repeat sequence, and
[1000] (b) a nucleotide sequence encoding a RNA targeting protein, wherein components (a) or (b) are located on the same or on different constructs, and whereby the different nucleotide sequences can be under control of the same or a different regulatory element operable in a plant cell.

[1001] DNA construct(s) containing the components of the RNA targeting CRISPR system, may be introduced into the genome of a plant, plant part, or plant cell by a variety of conventional techniques. The process generally comprises the steps of selecting a suitable host cell or host tissue, introducing the construct(s) into the host cell or host tissue, and regenerating plant cells or plants therefrom.

[1002] In particular embodiments, the DNA construct may be introduced into the plant cell using techniques such as but not limited to electroporation, microinjection, aerosol beam injection of plant cell protoplasts, or the DNA constructs can be introduced directly to plant tissue using biolistic methods, such as DNA particle bombardment (see also Fu et al., Transgenic Res. 2000 February; 9(1):11-9). The basis of particle bombardment is the acceleration of particles coated with gene/s of interest toward cells, resulting in the penetration of the protoplasm by the particles and typically stable integration into the genome. (see e.g. Klein et al, Nature (1987), Klein et al, Bio/Technology (1992), Casas et al, Proc. Natl. Acad. Sci. USA (1993).).

[1003] In particular embodiments, the DNA constructs containing components of the RNA targeting CRISPR system may be introduced into the plant by Agrobacterium-mediated transformation. The DNA constructs may be combined with suitable T-DNA flanking regions and introduced into a conventional Agrobacterium tumefaciens host vector. The foreign DNA can be incorporated into the genome of plants by infecting the plants or by incubating plant protoplasts with Agrobacterium bacteria, containing one or more Ti (tumor-inducing) plasmids. (see e.g. Fraley et al., (1985), Rogers et al., (1987) and U.S. Pat. No. 5,563,055).

### Plant Promoters

[1004] In order to ensure appropriate expression in a plant cell, the components of the CRISPR-Cas CRISPR system described herein are typically placed under control of a plant promoter, i.e. a promoter operable in plant cells. The use of different types of promoters is envisaged.

[1005] A constitutive plant promoter is a promoter that is able to express the open reading frame (ORF) that it controls in all or nearly all of the plant tissues during all or nearly all developmental stages of the plant (referred to as “constitutive expression”). One non-limiting example of a constitutive promoter is the cauliflower mosaic virus 35S promoter. The present invention envisages methods for modifying RNA sequences and as such also envisages regulating expression of plant biomolecules. In particular embodiments of the present invention it is thus advantageous to place one or more elements of the RNA targeting CRISPR system under the control of a promoter that can be regulated. “Regulated promoter” refers to promoters that direct gene expression not constitutively, but in a temporally- and/or spatially-regulated manner, and includes tissue-specific, tissue-preferred and inducible promoters. Different promoters may direct the expression of a gene in different tissues or cell types, or at different stages of development, or in response to different environmental conditions. In particular embodiments, one or more of the RNA targeting CRISPR components are expressed under the control of a constitutive promoter, such as the cauliflower mosaic virus 35S promoter issue-preferred promoters can be utilized to target enhanced expression in certain cell types within a particular plant tissue, for instance vascular cells in leaves or roots or in specific cells of the seed. Examples of particular promoters for use in the RNA targeting CRISPR system-are found in Kawamata et al., (1997) Plant Cell Physiol 38:792-803; Yamamoto et al., (1997) Plant J 12:255-65; Hire et al, (1992) Plant Mol Biol 20:207-18,Kuster et al, (1995) Plant Mol Biol 29:759-72, and Capana et al., (1994) Plant Mol Biol 25:681-91.

[1006] Examples of promoters that are inducible and that allow for spatiotemporal control of gene editing or gene expression may use a form of energy. The form of energy may include but is not limited to sound energy, electromagnetic radiation, chemical energy and/or thermal energy. Examples of inducible systems include tetracycline inducible promoters (Tet-On or Tet-Off), small molecule two-hybrid transcription activations systems (FKBP, ABA, etc), or light inducible systems (Phytochrome, LOV domains, or cryptochrome), such as a Light Inducible Transcriptional Effector (LITE) that direct changes in transcriptional activity in a sequence-specific manner. The components of a light inducible system may include a RNA targeting CRISPR-Cas, a light-responsive cytochrome heterodimer (e.g. from Arabidopsis thaliana), and a transcriptional activation/repression domain. Further examples of inducible DNA binding proteins and methods for their use are provided in U.S. 61/736,465 and U.S. 61/721,283, which is hereby incorporated by reference in its entirety.

[1007] In particular embodiments, transient or inducible expression can be achieved by using, for example, chemical-regulated promotors, i.e. whereby the application of an exogenous chemical induces gene expression. Modulating of gene expression can also be obtained by a chemical-repressible promoter, where application of the chemical represses gene expression. Chemical-inducible promoters include, but are not limited to, the maize 1n2-2 promoter, activated by benzene sulfonamide herbicide safeners (De Veylder et al., (1997) Plant Cell Physiol 38:568-77), the maize GST promoter (GST-11-27, WO93/01294), activated by hydrophobic electrophilic compounds used as pre-emergent herbicides, and the tobacco PR-1 a promoter (Ono et al., (2004) Biosci Biotechnol Biochem 68:803-7) activated by salicylic acid. Promoters which are regulated by antibiotics, such as tetracycline-inducible and tetracycline-repressible promoters (Gatz et al., (1991) Mol Gen Genet 227:229-37; U.S. Pat. Nos. 5,814,618 and 5,789,156) can also be used herein.

Translocation to and/or Expression in Specific Plant Organelles

[1008] The expression system may comprise elements for translocation to and/or expression in a specific plant organelle.

### Chloroplast Targeting

[1009] In particular embodiments, it is envisaged that the RNA targeting CRISPR system is used to specifically modify expression and/or translation of chloroplast genes or to ensure expression in the chloroplast. For this purpose use is made of chloroplast transformation methods or compartmentalization of the RNA targeting CRISPR components to the chloroplast. For instance, the introduction of genetic modifications in the plastid genome can reduce biosafety issues such as gene flow through pollen.

[1010] Methods of chloroplast transformation are known in the art and include Particle bombardment, PEG treatment, and microinjection. Additionally, methods involving the translocation of transformation cassettes from the nuclear genome to the plastid can be used as described in WO2010061186.

[1011] Alternatively, it is envisaged to target one or more of the RNA targeting CRISPR components to the plant chloroplast. This is achieved by incorporating in the expression construct a sequence encoding a chloroplast transit peptide (CTP) or plastid transit peptide, operably linked to the 5′ region of the sequence encoding the RNA targeting protein. The CTP is removed in a processing step during translocation into the chloroplast. Chloroplast targeting of expressed proteins is well known to the skilled artisan (see for instance Protein Transport into Chloroplasts, 2010, Annual Review of Plant Biology, Vol. 61: 157-180). In such embodiments it is also desired to target the one or more guide RNAs to the plant chloroplast. Methods and constructs which can be used for translocating guide RNA into the chloroplast by means of a chloroplast localization sequence are described, for instance, in US 20040142476, incorporated herein by reference. Such variations of constructs can be incorporated into the expression systems of the invention to efficiently translocate the RNA targeting-guide RNA(s).

### Introduction of Polynucleotides Encoding the CRISPR-RNA Targeting System in Algal Cells.

[1012] Transgenic algae (or other plants such as rape) may be particularly useful in the production of vegetable oils or biofuels such as alcohols (especially methanol and ethanol) or other products. These may be engineered to express or overexpress high levels of oil or alcohols for use in the oil or biofuel industries.

[1013] U.S. Pat. No. 8,945,839 describes a method for engineering Micro-Algae (Chlamydomonas reinhardtii cells) species) using Cas9. Using similar tools, the methods of the RNA targeting CRISPR system described herein can be applied on Chlamydomonas species and other algae. In particular embodiments, RNA targeting protein and guide RNA(s) are introduced in algae expressed using a vector that expresses RNA targeting protein under the control of a constitutive promoter such as Hsp70A-Rbc S2 or Beta2-tubulin. Guide RNA is optionally delivered using a vector containing T7 promoter. Alternatively, RNA targeting mRNA and in vitro transcribed guide RNA can be delivered to algal cells. Electroporation protocols are available to the skilled person such as the standard recommended protocol from the GeneArt Chlamydomonas Engineering kit.

### Introduction of Polynucleotides Encoding RNA Targeting Components in Yeast Cells

[1014] In particular embodiments, the invention relates to the use of the RNA targeting CRISPR system for RNA editing in yeast cells. Methods for transforming yeast cells which can be used to introduce polynucleotides encoding the RNA targeting CRISPR system components are well known to the artisan and are reviewed by Kawai et al., 2010, Bioeng Bugs. 2010 November-December; 1(6): 395-403). Non-limiting examples include transformation of yeast cells by lithium acetate treatment (which may further include carrier DNA and PEG treatment), bombardment or by electroporation.

### Transient Expression of RNA Targeting Crisp System Components in Plants and Plant Cell

[1015] In particular embodiments, it is envisaged that the guide RNA and/or RNA targeting gene are transiently expressed in the plant cell. In these embodiments, the RNA targeting CRISPR system can ensure modification of RNA target molecules only when both the guide RNA and the RNA targeting protein is present in a cell, such that gene expression can further be controlled. As the expression of the RNA targeting enzyme is transient, plants regenerated from such plant cells typically contain no foreign DNA. In particular embodiments the RNA targeting enzyme is stably expressed by the plant cell and the guide sequence is transiently expressed.

[1016] In particularly preferred embodiments, the RNA targeting CRISPR system components can be introduced in the plant cells using a plant viral vector (Scholthof et al. 1996, Annu Rev Phytopathol. 1996; 34:299-323). In further particular embodiments, said viral vector is a vector from a DNA virus. For example, geminivirus (e.g., cabbage leaf curl virus, bean yellow dwarf virus, wheat dwarf virus, tomato leaf curl virus, maize streak virus, tobacco leaf curl virus, or tomato golden mosaic virus) or nanovirus (e.g., Faba bean necrotic yellow virus). In other particular embodiments, said viral vector is a vector from an RNA virus. For example, tobravirus (e.g., tobacco rattle virus, tobacco mosaic virus), potexvirus (e.g., potato virus X), or hordeivirus (e.g., barley stripe mosaic virus). The replicating genomes of plant viruses are non-integrative vectors, which is of interest in the context of avoiding the production of GMO plants.

[1017] In particular embodiments, the vector used for transient expression of RNA targeting CRISPR constructs is for instance a pEAQ vector, which is tailored for Agrobacterium-mediated transient expression (Sainsbury F. et al., Plant Biotechnol J. 2009 September; 7(7):682-93) in the protoplast. Precise targeting of genomic locations was demonstrated using a modified Cabbage Leaf Curl virus (CaLCuV) vector to express gRNAs in stable transgenic plants expressing a Cas13 (see Scientific Reports 5, Article number: 14926 (2015), doi:10.1038/srep14926).

[1018] In particular embodiments, double-stranded DNA fragments encoding the guide RNA or crRNA and/or the RNA targeting gene can be transiently introduced into the plant cell. In such embodiments, the introduced double-stranded DNA fragments are provided in sufficient quantity to modify RNA molecule(s) in the cell but do not persist after a contemplated period of time has passed or after one or more cell divisions. Methods for direct DNA transfer in plants are known by the skilled artisan (see for instance Davey et al. Plant Mol Biol. 1989 September; 13(3):273-85.)

[1019] In other embodiments, an RNA polynucleotide encoding the RNA targeting protein is introduced into the plant cell, which is then translated and processed by the host cell generating the protein in sufficient quantity to modify the RNA molecule(s) cell (in the presence of at least one guide RNA) but which does not persist after a contemplated period of time has passed or after one or more cell divisions. Methods for introducing mRNA to plant protoplasts for transient expression are known by the skilled artisan (see for instance in Gallie, Plant Cell Reports (1993), 13; 119-122). Combinations of the different methods described above are also envisaged.

### Delivery of RNA Targeting CRISPR Components to the Plant Cell

[1020] In particular embodiments, it is of interest to deliver one or more components of the RNA targeting CRISPR system directly to the plant cell. This is of interest, inter alia, for the generation of non-transgenic plants. In particular embodiments, one or more of the RNA targeting components is prepared outside the plant or plant cell and delivered to the cell. For instance in particular embodiments, the RNA targeting protein is prepared in vitro prior to introduction to the plant cell. RNA targeting protein can be prepared by various methods known by one of skill in the art and include recombinant production. After expression, the RNA targeting protein is isolated, refolded if needed, purified and optionally treated to remove any purification tags, such as a His-tag. Once crude, partially purified, or more completely purified RNA targeting protein is obtained, the protein may be introduced to the plant cell.

[1021] In particular embodiments, the RNA targeting protein is mixed with guide RNA targeting the RNA of interest to form a pre-assembled ribonucleoprotein.

[1022] The individual components or pre-assembled ribonucleoprotein can be introduced into the plant cell via electroporation, by bombardment with RNA targeting-associated gene product coated particles, by chemical transfection or by some other means of transport across a cell membrane. For instance, transfection of a plant protoplast with a pre-assembled CRISPR ribonucleoprotein has been demonstrated to ensure targeted modification of the plant genome (as described by Woo et al. Nature Biotechnology, 2015; DOI: 10.1038/nbt.3389). These methods can be modified to achieve targeted modification of RNA molecules in the plants.

[1023] In particular embodiments, the RNA targeting CRISPR system components are introduced into the plant cells using nanoparticles. The components, either as protein or nucleic acid or in a combination thereof, can be uploaded onto or packaged in nanoparticles and applied to the plants (such as for instance described in WO 2008042156 and US 20130185823). In particular, embodiments of the invention comprise nanoparticles uploaded with or packed with DNA molecule(s) encoding the RNA targeting protein, DNA molecules encoding the guide RNA and/or isolated guide RNA as described in WO2015089419.

[1024] Further means of introducing one or more components of the RNA targeting CRISPR system to the plant cell is by using cell penetrating peptides (CPP). Accordingly, in particular, embodiments the invention comprises compositions comprising a cell penetrating peptide linked to an RNA targeting protein. In particular embodiments of the present invention, an RNA targeting protein and/or guide RNA(s) is coupled to one or more CPPs to effectively transport them inside plant protoplasts (Ramakrishna (2014, Genome Res. 2014 June; 24(6):1020-7 for Cas9 in human cells). In other embodiments, the RNA targeting gene and/or guide RNA(s) are encoded by one or more circular or non-circular DNA molecule(s) which are coupled to one or more CPPs for plant protoplast delivery. The plant protoplasts are then regenerated to plant cells and further to plants. CPPs are generally described as short peptides of fewer than 35 amino acids either derived from proteins or from chimeric sequences which are capable of transporting biomolecules across cell membrane in a receptor independent manner. CPP can be cationic peptides, peptides having hydrophobic sequences, amphipatic peptides, peptides having proline-rich and anti-microbial sequence, and chimeric or bipartite peptides (Pooga and Langel 2005). CPPs are able to penetrate biological membranes and as such trigger the movement of various biomolecules across cell membranes into the cytoplasm and to improve their intracellular routing, and hence facilitate interaction of the biolomolecule with the target. Examples of CPP include amongst others: Tat, a nuclear transcriptional activator protein required for viral replication by HIV typel, penetratin, Kaposi fibroblast growth factor (FGF) signal peptide sequence, integrin (33 signal peptide sequence; polyarginine peptide Args sequence, Guanine rich-molecular transporters, sweet arrow peptide, etc.

### Target RNA Envisaged for Plant, Algae or Fungal Applications

[1025] The target RNA, i.e. the RNA of interest, is the RNA to be targeted by the present invention leading to the recruitment to, and the binding of the RNA targeting protein at, the target site of interest on the target RNA. The target RNA may be any suitable form of RNA. This may include, in some embodiments, mRNA. In other embodiments, the target RNA may include transfer RNA (tRNA) or ribosomal RNA (rRNA). In other embodiments the target RNA may include interfering RNA (RNAi), microRNA (miRNA), microswitches, microzymes, satellite RNAs and RNA viruses. The target RNA may be located in the cytoplasm of the plant cell, or in the cell nucleus or in a plant cell organelle such as a mitochondrion, chloroplast or plastid.

[1026] In particular embodiments, the RNA targeting CRISPR system is used to cleave RNA or otherwise inhibit RNA expression.

### Use of RNA Targeting CRISPR System for Modulating Plant Gene Expression Via RNA Modulation

[1027] The RNA targeting protein may also be used, together with a suitable guide RNA, to target gene expression, via control of RNA processing. The control of RNA processing may include RNA processing reactions such as RNA splicing, including alternative splicing; viral replication (in particular of plant viruses, including virioids in plants and tRNA biosynthesis. The RNA targeting protein in combination with a suitable guide RNA may also be used to control RNA activation (RNAa). RNAa leads to the promotion of gene expression, so control of gene expression may be achieved that way through disruption or reduction of RNAa and thus less promotion of gene expression.

[1028] The RNA targeting effector protein of the invention can further be used for antiviral activity in plants, in particular against RNA viruses. The effector protein can be targeted to the viral RNA using a suitable guide RNA selective for a selected viral RNA sequence. In particular, the effector protein may be an active nuclease that cleaves RNA, such as single stranded RNA. provided is therefore the use of an RNA targeting effector protein of the invention as an antiviral agent. Examples of viruses that can be counteracted in this way include, but are not limited to, Tobacco mosaic virus (TMV), Tomato spotted wilt virus (TSWV), Cucumber mosaic virus (CMV), Potato virus Y (PVY), Cauliflower mosaic virus (CaMV) (RT virus), Plum pox virus (PPV), Brome mosaic virus (BMV) and Potato virus X (PVX).

[1029] Examples of modulating RNA expression in plants, algae or fungi, as an alternative of targeted gene modification are described herein further.

[1030] Of particular interest is the regulated control of gene expression through regulated cleavage of mRNA. This can be achieved by placing elements of the RNA targeting under the control of regulated promoters as described herein.

### Use of the RNA Targeting CRISPR System to Restore the Functionality of TRNA Molecules.

[1031] Pring et al describe RNA editing in plant mitochondria and chloroplasts that alters mRNA sequences to code for different proteins than the DNA. (Plant Mol. Biol. (1993) 21 (6): 1163-1170. doi:10.1007/BF00023611). In particular embodiments of the invention, the elements of the RNA targeting CRISPR system specifically targeting mitochondrial and chloroplast rnRNA can be introduced in a plant or plant cell to express different proteins in such plant cell organelles mimicking the processes occurring in vivo.

### Use of the RNA Targeting CRISPR System as an Alternative to RNA Interference to Inhibit RNA Expression.

[1032] The RNA targeting CRISPR system has uses similar to RNA inhibition or RNA interference, thus can also be substituted for such methods. In particular embodiment, the methods of the present invention include the use of the RNA targeting CRISPR as a substitute for e.g. an interfering ribonucleic acid (such as an siRNA or shRNA or a dsRNA). Examples of inhibition of RNA expression in plants, algae or fungi as an alternative of targeted gene modification are described herein further.

### Use of the RNA Targeting CRISPR System to Control RNA Interference.

[1033] Control over interfering RNA or miRNA may help reduce off-target effects (OTE) seen with those approaches by reducing the longevity of the interfering RNA or miRNA in vivo or in vitro. In particular embodiments, the target RNA may include interfering RNA, i.e. RNA involved in an RNA interference pathway, such as shRNA, siRNA and so forth. In other embodiments, the target RNA may include microRNA (miRNA) or double stranded RNA (dsRNA).

[1034] In other particular embodiments, if the RNA targeting protein and suitable guide RNA(s) are selectively expressed (for example spatially or temporally under the control of a regulated promoter, for example a tissue- or cell cycle-specific promoter and/or enhancer) this can be used to ‘protect’ the cells or systems (in vivo or in vitro) from RNAi in those cells. This may be useful in neighboring tissues or cells where RNAi is not required or for the purposes of comparison of the cells or tissues where the effector protein and suitable guide are and are not expressed (i.e. where the RNAi is not controlled and where it is, respectively). The RNA targeting protein may be used to control or bind to molecules comprising or consisting of RNA, such as ribozymes, ribosomes or riboswitches. In embodiments of the invention, the guide RNA can recruit the RNA targeting protein to these molecules so that the RNA targeting protein is able to bind to them.

[1035] The RNA targeting CRISPR system of the invention can be applied in areas of in-planta RNAi technologies, without undue experimentation, from this disclosure, including insect pest management, plant disease management and management of herbicide resistance, as well as in plant assay and for other applications (see, for instance Kim et al., in Pesticide Biochemistry and Physiology (Impact Factor: 2.01). 01/2015; 120. DOI: 10.1016/j.pestbp.2015.01.002; Sharma et al. in Academic Journals (2015), Vol. 12(18) pp 2303-2312); Green J. M, inPest Management Science, Vol 70(9), pp 1351-1357), because the present application provides the foundation for informed engineering of the system.

### Use of RNA Targeting CRISPR System to Modify Riboswitches and Control Metabolic Regulation in Plants, Algae and Fungi

[1036] Riboswitches (also known as aptozymes) are regulatory segments of messenger RNA that bind small molecules and in turn regulate gene expression. This mechanism allows the cell to sense the intracellular concentration of these small molecules. A particular riboswitch typically regulates its adjacent gene by altering the transcription, the translation or the splicing of this gene. Thus, in particular embodiments of the present invention, control of riboswitch activity is envisaged through the use of the RNA targeting protein in combination with a suitable guide RNA to target the riboswitch. This may be through cleavage of, or binding to, the riboswitch. In particular embodiments, reduction of riboswitch activity is envisaged. Recently, a riboswitch that binds thiamin pyrophosphate (TPP) was characterized and found to regulate thiamin biosynthesis in plants and algae. Furthermore it appears that this element is an essential regulator of primary metabolism in plants (Bocobza and Aharoni, Plant J. 2014 August; 79(4):693-703. doi: 10.1111/tpj.12540. Epub 2014 Jun. 17). TPP riboswitches are also found in certain fungi, such as in Neurospora crassa, where it controls alternative splicing to conditionally produce an Upstream Open Reading Frame (uORF), thereby affecting the expression of downstream genes (Cheah M T et al., (2007) Nature 447 (7143): 497-500. doi:10.1038/nature05769) The RNA targeting CRISPR system described herein may be used to manipulate the endogenous riboswitch activity in plants, algae or fungi and as such alter the expression of downstream genes controlled by it. In particular embodiments, the RNA targeting CRISP system may be used in assaying riboswitch function in vivo or in vitro and in studying its relevance for the metabolic network. In particular embodiments the RNA targeting CRISPR system may potentially be used for engineering of riboswitches as metabolite sensors in plants and platforms for gene control.

### Use of RNA Targeting CRISPR System in RNAi Screens for Plants, Algae or Fungi

[1037] Identifying gene products whose knockdown is associated with phenotypic changes, biological pathways can be interrogated and the constituent parts identified, via RNAi screens. In particular embodiments of the invention, control may also be exerted over or during these screens by use of the Guide 29 or Guide 30 protein and suitable guide RNA described herein to remove or reduce the activity of the RNAi in the screen and thus reinstate the activity of the (previously interfered with) gene product (by removing or reducing the interference/repression).

### Use of RNA Targeting Proteins for Visualization of RNA Molecules In Vivo and In Vitro

[1038] In particular embodiments, the invention provides a nucleic acid binding system. In situ hybridization of RNA with complementary probes is a powerful technique. Typically fluorescent DNA oligonucleotides are used to detect nucleic acids by hybridization. Increased efficiency has been attained by certain modifications, such as locked nucleic acids (LNAs), but there remains a need for efficient and versatile alternatives. As such, labelled elements of the RNA targeting system can be used as an alternative for efficient and adaptable system for in situ hybridization

### Further Applications of the RNA Targeting CRISPR System in Plants and Yeasts

### Use of RNA Targeting CRISPR System in Biofuel Production

[1039] The term “biofuel” as used herein is an alternative fuel made from plant and plant-derived resources. Renewable biofuels can be extracted from organic matter whose energy has been obtained through a process of carbon fixation or are made through the use or conversion of biomass. This biomass can be used directly for biofuels or can be converted to convenient energy containing substances by thermal conversion, chemical conversion, and biochemical conversion. This biomass conversion can result in fuel in solid, liquid, or gas form. There are two types of biofuels: bioethanol and biodiesel. Bioethanol is mainly produced by the sugar fermentation process of cellulose (starch), which is mostly derived from maize and sugar cane. Biodiesel on the other hand is mainly produced from oil crops such as rapeseed, palm, and soybean. Biofuels are used mainly for transportation.

### Enhancing Plant Properties for Biofuel Production

[1040] In particular embodiments, the methods using the RNA targeting CRISPR system as described herein are used to alter the properties of the cell wall in order to facilitate access by key hydrolysing agents for a more efficient release of sugars for fermentation. In particular embodiments, the biosynthesis of cellulose and/or lignin are modified. Cellulose is the major component of the cell wall. The biosynthesis of cellulose and lignin are co-regulated. By reducing the proportion of lignin in a plant the proportion of cellulose can be increased. In particular embodiments, the methods described herein are used to downregulate lignin biosynthesis in the plant so as to increase fermentable carbohydrates. More particularly, the methods described herein are used to downregulate at least a first lignin biosynthesis gene selected from the group consisting of 4-coumarate 3-hydroxylase (C3H), phenylalanine ammonia-lyase (PAL), cinnamate 4-hydroxylase (C4H), hydroxycinnamoyl transferase (HCT), caffeic acid O-methyltransferase (COMT), caffeoyl CoA 3-O-methyltransferase (CCoAOMT), ferulate 5-hydroxylase (F5H), cinnamyl alcohol dehydrogenase (CAD), cinnamoyl CoA-reductase (CCR), 4-coumarate-CoA ligase (4CL), monolignol-lignin-specific glycosyltransferase, and aldehyde dehydrogenase (ALDH) as disclosed in WO 2008064289 A2.

[1041] In particular embodiments, the methods described herein are used to produce plant mass that produces lower levels of acetic acid during fermentation (see also WO 2010096488).

### Modifying Yeast for Biofuel Production

[1042] In particular embodiments, the RNA targeting enzyme provided herein is used for bioethanol production by recombinant micro-organisms. For instance, RNA targeting enzymes can be used to engineer micro-organisms, such as yeast, to generate biofuel or biopolymers from fermentable sugars and optionally to be able to degrade plant-derived lignocellulose derived from agricultural waste as a source of fermentable sugars. More particularly, the invention provides methods whereby the RNA targeting CRISPR complex is used to modify the expression of endogenous genes required for biofuel production and/or to modify endogenous genes why may interfere with the biofuel synthesis. More particularly the methods involve stimulating the expression in a micro-organism such as a yeast of one or more nucleotide sequence encoding enzymes involved in the conversion of pyruvate to ethanol or another product of interest. In particular embodiments the methods ensure the stimulation of expression of one or more enzymes which allows the micro-organism to degrade cellulose, such as a cellulase. In yet further embodiments, the RNA targeting CRISPR complex is used to suppress endogenous metabolic pathways which compete with the biofuel production pathway.

### Modifying Algae and Plants for Production of Vegetable Oils or Biofuels

[1043] Transgenic algae or other plants such as rape may be particularly useful in the production of vegetable oils or biofuels such as alcohols (especially methanol and ethanol), for instance. These may be engineered to express or overexpress high levels of oil or alcohols for use in the oil or biofuel industries.

[1044] U.S. Pat. No. 8,945,839 describes a method for engineering Micro-Algae (Chlamydomonas reinhardtii cells) species) using Cas9. Using similar tools, the methods of the RNA targeting CRISPR system described herein can be applied on Chlamydomonas species and other algae. In particular embodiments, the RNA targeting effector protein and guide RNA are introduced in algae expressed using a vector that expresses the RNA targeting effector protein under the control of a constitutive promoter such as Hsp70A-Rbc S2 or Beta2-tubulin. Guide RNA will be delivered using a vector containing T7 promoter. Alternatively, in vitro transcribed guide RNA can be delivered to algae cells. Electroporation protocol follows standard recommended protocol from the GeneArt Chlamydomonas Engineering kit.

### Particular Applications of the RNA Targeting Enzymes in Plants

[1045] In particular embodiments, present invention can be used as a therapy for virus removal in plant systems as it is able to cleave viral RNA. Previous studies in human systems have demonstrated the success of utilizing CRISPR in targeting the single strand RNA virus, hepatitis C (A. Price, et al., Proc. Natl. Acad. Sci, 2015). These methods may also be adapted for using the RNA targeting CRISPR system in plants.

### Improved Plants

[1046] The present invention also provides plants and yeast cells obtainable and obtained by the methods provided herein. The improved plants obtained by the methods described herein may be useful in food or feed production through the modified expression of genes which, for instance ensure tolerance to plant pests, herbicides, drought, low or high temperatures, excessive water, etc.

[1047] The improved plants obtained by the methods described herein, especially crops and algae may be useful in food or feed production through expression of, for instance, higher protein, carbohydrate, nutrient or vitamin levels than would normally be seen in the wildtype. In this regard, improved plants, especially pulses and tubers are preferred.

[1048] Improved algae or other plants such as rape may be particularly useful in the production of vegetable oils or biofuels such as alcohols (especially methanol and ethanol), for instance. These may be engineered to express or overexpress high levels of oil or alcohols for use in the oil or biofuel industries.

[1049] The invention also provides for improved parts of a plant. Plant parts include, but are not limited to, leaves, stems, roots, tubers, seeds, endosperm, ovule, and pollen. Plant parts as envisaged herein may be viable, nonviable, regeneratable, and/or non-regeneratable.

[1050] It is also encompassed herein to provide plant cells and plants generated according to the methods of the invention. Gametes, seeds, embryos, either zygotic or somatic, progeny or hybrids of plants comprising the genetic modification, which are produced by traditional breeding methods, are also included within the scope of the present invention. Such plants may contain a heterologous or foreign DNA sequence inserted at or instead of a target sequence. Alternatively, such plants may contain only an alteration (mutation, deletion, insertion, substitution) in one or more nucleotides. As such, such plants will only be different from their progenitor plants by the presence of the particular modification.

[1051] In an embodiment of the invention, a CRISPR-Cas system is used to engineer pathogen resistant plants, for example by creating resistance against diseases caused by bacteria, fungi or viruses. In certain embodiments, pathogen resistance can be accomplished by engineering crops to produce a CRISPR-Cas system that will be ingested by an insect pest, leading to mortality. In an embodiment of the invention, a CRISPR-Cas system is used to engineer abiotic stress tolerance. In another embodiment, a CRISPR-Cas system is used to engineer drought stress tolerance or salt stress tolerance, or cold or heat stress tolerance. Younis et al. 2014, Int. J. Biol. Sci. 10; 1150 reviewed potential targets of plant breeding methods, all of which are amenable to correction or improvement through use of a CRISPR-Cas system described herein. Some non-limiting target crops include Arabidops Zea mays is thaliana, Oryza sativa L, Prunus domestica L., Gossypium hirsutum, Nicotiana rustica, Zea mays, Medicago sativa, Nicotiana benthamiana and Arabidopsis thaliana

[1052] In an embodiment of the invention, a CRISPR-Cas system is used for management of crop pests. For example, a CRISPR-Cas system operable in a crop pest can be expressed from a plant host or transferred directly to the target, for example using a viral vector.

[1053] In an embodiment, the invention provides a method of efficiently producing homozygous organisms from a heterozygous non-human starting organism. In an embodiment, the invention is used in plant breeding. In another embodiment, the invention is used in animal breeding. In such embodiments, a homozygous organism such as a plant or animal is made by preventing or suppressing recombination by interfering with at least one target gene involved in double strand breaks, chromosome pairing and/or strand exchange.

### CRISPR-Cas Effector Protein Complexes can be Used in Plants

[1054] The invention in some embodiments comprehends a method of modifying an cell or organism. The cell may be a prokaryotic cell or a eukaryotic cell. The cell may be a mammalian cell. The mammalian cell many be a non-human primate, bovine, porcine, rodent or mouse cell. The cell may be a non-mammalian eukaryotic cell such as poultry, fish or shrimp. The cell may also be a plant cell. The plant cell may be of a crop plant such as cassava, corn, sorghum, wheat, or rice. The plant cell may also be of an algae, tree or vegetable. The modification introduced to the cell by the present invention may be such that the cell and progeny of the cell are altered for improved production of biologic products such as an antibody, starch, alcohol or other desired cellular output. The modification introduced to the cell by the present invention may be such that the cell and progeny of the cell include an alteration that changes the biologic product produced. The system may comprise one or more different vectors. In an aspect of the invention, the effector protein is codon optimized for expression the desired cell type, preferentially a eukaryotic cell, preferably a mammalian cell or a human cell. CRISPR-Cas system(s) (e.g., single or multiplexed) can be used in conjunction with recent advances in crop genomics. Such CRISPR system(s) can be used to perform efficient and cost effective plant gene or genome or transcriptome interrogation or editing or manipulation—for instance, for rapid investigation and/or selection and/or interrogations and/or comparison and/or manipulations and/or transformation of plant genes or genomes; e.g., to create, identify, develop, optimize, or confer trait(s) or characteristic(s) to plant(s) or to transform a plant genome. There can accordingly be improved production of plants, new plants with new combinations of traits or characteristics or new plants with enhanced traits. Such CRISPR system(s) can be used with regard to plants in Site-Directed Integration (SDI) or Gene Editing (GE) or any Near Reverse Breeding (NRB) or Reverse Breeding (RB) techniques. Accordingly, reference herein to animal cells may also apply, mutatis mutandis, to plant cells unless otherwise apparent; and, the enzymes herein having reduced off-target effects and systems employing such enzymes can be used in plant applications, including those mentioned herein. Engineered plants modified by the effector protein and suitable guide (crRNA), and progeny thereof, as provided. These may include disease or drought resistant crops, such as wheat, barley, rice, soybean or corn; plants modified to remove or reduce the ability to self-pollinate (but which can instead, optionally, hybridise instead); and allergenic foods such as peanuts and nuts where the immunogenic proteins have been disabled, destroyed or disrupted by targeting via a effector protein and suitable guide. Any aspect of using classical CRISPR-Cas systems may be adapted to use in CRISPR systems that are Cas protein agnostic, e.g. Cas13 effector protein systems.

### Models of Conditions

[1055] A method of the invention may be used to create a plant, an animal or cell that may be used to model and/or study genetic or epigenetic conditions of interest, such as a through a model of mutations of interest or a disease model. As used herein, “disease” refers to a disease, disorder, or indication in a subject. For example, a method of the invention may be used to create an animal or cell that comprises a modification in one or more nucleic acid sequences associated with a disease, or a plant, animal or cell in which expression of one or more nucleic acid sequences associated with a disease are altered. Such a nucleic acid sequence may encode or be translated a disease associated protein sequence or may be a disease associated control sequence. Accordingly, it is understood that in embodiments of the invention, a plant, subject, patient, organism or cell can be a non-human subject, patient, organism or cell. Thus, the invention provides a plant, animal or cell, produced by the present methods, or a progeny thereof. The progeny may be a clone of the produced plant or animal, or may result from sexual reproduction by crossing with other individuals of the same species to introgress further desirable traits into their offspring. The cell may be in vivo or ex vivo in the cases of multicellular organisms, particularly animals or plants. In the instance where the cell is in cultured, a cell line may be established if appropriate culturing conditions are met and preferably if the cell is suitably adapted for this purpose (for instance a stem cell). Bacterial cell lines produced by the invention are also envisaged. Hence, cell lines are also envisaged. In some methods, the disease model can be used to study the effects of mutations, or more general altered, such as reduced, expression of genes or gene products on the animal or cell and development and/or progression of the disease using measures commonly used in the study of the disease. Alternatively, such a disease model is useful for studying the effect of a pharmaceutically active compound on the disease. In some methods, the disease model can be used to assess the efficacy of a potential gene therapy strategy. That is, a disease-associated RNA can be modified such that the disease development and/or progression is displayed or inhibited or reduced and then effects of a compound on the progression or inhibition or reduction are tested.

[1056] Useful in the practice of the instant invention utilizing CRISPR-Cas effector proteins and complexes thereof and nucleic acid molecules encoding same and methods using same, reference is made to: Genome-Scale CRISPR-Cas9 Knockout Screening in Human Cells. Shalem, O., Sanjana, N E., Hartenian, E., Shi, X., Scott, D A., Mikkelson, T., Heckl, D., Ebert, B L., Root, D E., Doench, J G., Zhang, F. Science December 12. (2013). [Epub ahead of print]; Published in final edited form as: Science. 2014 Jan. 3; 343(6166): 84-87. Shalem et al. involves a new way to interrogate gene function on a genome-wide scale. Their studies showed that delivery of a genome-scale CRISPR-Cas9 knockout (GeCKO) library targeted 18,080 genes with 64,751 unique guide sequences enabled both negative and positive selection screening in human cells. First, the authors showed use of the GeCKO library to identify genes essential for cell viability in cancer and pluripotent stem cells. Next, in a melanoma model, the authors screened for genes whose loss is involved in resistance to vemurafenib, a therapeutic that inhibits mutant protein kinase BRAF. Their studies showed that the highest-ranking candidates included previously validated genes NF1 and MED12 as well as novel hitsNF2, CUL3, TADA2B, and TADA1. The authors observed a high level of consistency between independent guide RNAs targeting the same gene and a high rate of hit confirmation, and thus demonstrated the promise of genome-scale screening with Cas9. Reference is also made to US patent publication number US20140357530; and PCT Patent Publication WO2014093701, hereby incorporated herein by reference.

[1057] The term “associated with” is used here in relation to the association of the functional domain to the CRISPR-Cas effector protein or the adaptor protein. It is used in respect of how one molecule ‘associates’ with respect to another, for example between an adaptor protein and a functional domain, or between the CRISPR-Cas effector protein and a functional domain. In the case of such protein-protein interactions, this association may be viewed in terms of recognition in the way an antibody recognizes an epitope. Alternatively, one protein may be associated with another protein via a fusion of the two, for instance one subunit being fused to another subunit. Fusion typically occurs by addition of the amino acid sequence of one to that of the other, for instance via splicing together of the nucleotide sequences that encode each protein or subunit. Alternatively, this may essentially be viewed as binding between two molecules or direct linkage, such as a fusion protein. In any event, the fusion protein may include a linker between the two subunits of interest (i.e. between the enzyme and the functional domain or between the adaptor protein and the functional domain). Thus, in some embodiments, the CRISPR-Cas effector protein or adaptor protein is associated with a functional domain by binding thereto. In other embodiments, the CRISPR-Cas effector protein or adaptor protein is associated with a functional domain because the two are fused together, optionally via an intermediate linker.

### Therapeutic Applications

[1058] The system of the invention can be applied in areas of former RNA cutting technologies, without undue experimentation, from this disclosure, including therapeutic, assay and other applications, because the present application provides the foundation for informed engineering of the system. The present invention provides for therapeutic treatment of a disease caused by overexpression of RNA, toxic RNA and/or mutated RNA (such as, for example, splicing defects or truncations). Expression of the toxic RNA may be associated with formation of nuclear inclusions and late-onset degenerative changes in brain, heart or skeletal muscle. In the best studied example, myotonic dystrophy, it appears that the main pathogenic effect of the toxic RNA is to sequester binding proteins and compromise the regulation of alternative splicing (Hum. Mol. Genet. (2006) 15 (suppl 2): R162-R169). Myotonic dystrophy [dystrophia myotonica (DM)] is of particular interest to geneticists because it produces an extremely wide range of clinical features. A partial listing would include muscle wasting, cataracts, insulin resistance, testicular atrophy, slowing of cardiac conduction, cutaneous tumors and effects on cognition. The classical form of DM, which is now called DM type 1 (DM1), is caused by an expansion of CTG repeats in the 3′-untranslated region (UTR) of DMPK, a gene encoding a cytosolic protein kinase.

[1059] The innate immune system detects viral infection primarily by recognizing viral nucleic acids inside an infected cell, referred to as DNA or RNA sensing. In vitro RNA sensing assays can be used to detect specific RNA substrates. The RNA targeting effector protein can for instance be used for RNA-based sensing in living cells. Examples of applications are diagnostics by sensing of, for examples, disease-specific RNAs. The RNA targeting effector protein of the invention can further be used for antiviral activity, in particular against RNA viruses. The effector protein can be targeted to the viral RNA using a suitable guide RNA selective for a selected viral RNA sequence. In particular, the effector protein may be an active nuclease that cleaves RNA, such as single stranded RNA. Therapeutic dosages of the enzyme system of the present invention to target RNA the above-referenced RNAs are contemplated to be about 0.1 to about 2 mg/kg the dosages may be administered sequentially with a monitored response, and repeated dosages if necessary, up to about 7 to 10 doses per patient. Advantageously, samples are collected from each patient during the treatment regimen to ascertain the effectiveness of treatment. For example, RNA samples may be isolated and quantified to determine if expression is reduced or ameliorated. Such a diagnostic is within the purview of one of skill in the art.

[1060] In some examples, the disease is caused by a G→A or C→T point mutation or a pathogenic SNP. In some examples, the disease caused by a T→C or A→G point mutation or a pathogenic SNP. For example, the disease may be cancer, haemophilia, beta-thalassemia, Marfan syndrome and Wiskott-Aldrich syndrome.

### Exemplary Therapies

[1061] The present invention also contemplates use of the CRISPR-Cas system and the base editor described herein, for treatment in a variety of diseases and disorders. In some embodiments, the invention described herein relates to a method for therapy in which cells are edited ex vivo by CRISPR or the base editor to modulate at least one gene, with subsequent administration of the edited cells to a patient in need thereof. In some embodiments, the editing involves knocking in, knocking out or knocking down expression of at least one target gene in a cell. In particular embodiments, the editing inserts an exogenous, gene, minigene or sequence, which may comprise one or more exons and introns or natural or synthetic introns into the locus of a target gene, a hot-spot locus, a safe harbor locus of the gene genomic locations where new genes or genetic elements can be introduced without disrupting the expression or regulation of adjacent genes, or correction by insertions or deletions one or more mutations in DNA sequences that encode regulatory elements of a target gene. In some embodiment, the editing comprise introducing one or more point mutations in a nucleic acid (e.g., a genomic DNA) in a target cell.

[1062] In embodiments, the treatment is for disease/disorder of an organ, including liver disease, eye disease, muscle disease, heart disease, blood disease, brain disease, kidney disease, or may comprise treatment for an autoimmune disease, central nervous system disease, cancer and other proliferative diseases, neurodegenerative disorders, inflammatory disease, metabolic disorder, musculoskeletal disorder and the like.

[1063] Particular diseases/disorders include chondroplasia, achromatopsia, acid maltase deficiency, adrenoleukodystrophy, aicardi syndrome, alpha-1 antitrypsin deficiency, alpha-thalassemia, androgen insensitivity syndrome, apert syndrome, arrhythmogenic right ventricular, dysplasia, ataxia telangictasia, barth syndrome, beta-thalassemia, blue rubber bleb nevus syndrome, canavan disease, chronic granulomatous diseases (CGD), cri du chat syndrome, cystic fibrosis, dercum's disease, ectodermal dysplasia, fanconi anemia, fibrodysplasia ossificans progressive, fragile X syndrome, galactosemis, Gaucher's disease, generalized gangliosidoses (e.g., GM1), hemochromatosis, the hemoglobin C mutation in the 6th codon of beta-globin (HbC), hemophilia, Huntington's disease, Hurler Syndrome, hypophosphatasia, Klinefleter syndrome, Krabbes Disease, Langer-Giedion Syndrome, leukodystrophy, long QT syndrome, Marfan syndrome, Moebius syndrome, mucopolysaccharidosis (MPS), nail patella syndrome, nephrogenic diabetes insipdius, neurofibromatosis, Neimann-Pick disease, osteogenesis imperfecta, Porphyria, Prader-Willi syndrome, progeria, Proteus syndrome, retinoblastoma, Rett syndrome, Rubinstein-Taybi syndrome, Sanfilippo syndrome, severe combined immunodeficiency (SCID), Shwachman syndrome, sickle cell disease (sickle cell anemia), Smith-Magenis syndrome, Stickler syndrome, Tay-Sachs disease, Thrombocytopenia Absent Radius (TAR) syndrome, Treacher Collins syndrome, trisomy, tuberous sclerosis, Turner's syndrome, urea cycle disorder, von Hippel-Landau disease, Waardenburg syndrome, Williams syndrome, Wilson's disease, and Wiskott-Aldrich syndrome.

[1064] In embodiments, the disease is associated with expression of a tumor antigen, e.g., a proliferative disease, a precancerous condition, a cancer, or a non-cancer related indication associated with expression of the tumor antigen, which may in some embodiments comprise a target selected from B2M, CD247, CD3D, CD3E, CD3G, TRAC, TRBC1, TRBC2, HLA-A, HLA-B, HLA-C, DCK, CD52, FKBP1A, CIITA, NLRC5, RFXANK, RFX5, RFXAP, or NR3C1, HAVCR2, LAG3, PDCD1, PD-L2, CTLA4, CEACAM (CEACAM-1, CEACAM-3 and/or CEACAM-5), VISTA, BTLA, TIGIT, LAIR1, CD160, 2B4, CD80, CD86, B7-H3 (CD113), B7-H4 (VTCN1), HVEM (TNFRSF14 or CD107), KIR, A2aR, MEW class I, MEW class II, GALS, adenosine, and TGF beta, or PTPN11 DCK, CD52, NR3C1, LILRB1, CD19; CD123; CD22; CD30; CD171; CS-1 (also referred to as CD2 subset 1, CRACC, SLAMF7, CD319, and 19A24); C-type lectin-like molecule-1 (CLL-1 or CLECL1); CD33; epidermal growth factor receptor variant III (EGFRvIII); ganglioside G2 (GD2); ganglioside GD3 (aNeu5Ac(2-8)aNeu5Ac(2-3)bDGalp(1-4)bDGlcp(1-1)Cer); TNF receptor family member B cell maturation (BCMA); Tn antigen ((Tn Ag) or (GalNAca-Ser/Thr)); prostate-specific membrane antigen (PSMA); Receptor tyrosine kinase-like orphan receptor 1 (ROR1); Fms-Like Tyrosine Kinase 3 (FLT3); Tumor-associated glycoprotein 72 (TAG72); CD38; CD44v6; Carcinoembryonic antigen (CEA); Epithelial cell adhesion molecule (EPCAM); B7H3 (CD276); KIT (CD117); Interleukin-13 receptor subunit alpha-2 (IL-13Ra2 or CD213A2); Mesothelin; Interleukin 11 receptor alpha (IL-11Ra); prostate stem cell antigen (PSCA); Protease Serine 21 (Testisin or PRSS21); vascular endothelial growth factor receptor 2 (VEGFR2); Lewis(Y) antigen; CD24; Platelet-derived growth factor receptor beta (PDGFR-beta); Stage-specific embryonic antigen-4 (SSEA-4); CD20; Folate receptor alpha; Receptor tyrosine-protein kinase ERBB2 (Her2/neu); n kinase ERBB2 (Her2/neu); Mucin 1, cell surface associated (MUC1); epidermal growth factor receptor (EGFR); neural cell adhesion molecule (NCAM); Prostase; prostatic acid phosphatase (PAP); elongation factor 2 mutated (ELF2M); Ephrin B2; fibroblast activation protein alpha (FAP); insulin-like growth factor 1 receptor (IGF-I receptor), carbonic anhydrase IX (CAIX); Proteasome (Prosome, Macropain) Subunit, Beta Type, 9 (LMP2); glycoprotein 100 (gp100); oncogene fusion protein consisting of breakpoint cluster region (BCR) and Abelson murine leukemia viral oncogene homolog 1 (Abl) (bcr-abl); tyrosinase; ephrin type-A receptor 2 (EphA2); Fucosyl GM1; sialyl Lewis adhesion molecule (sLe); ganglioside GM3 (aNeu5Ac(2-3)bDGalp(1-4)bDGlcp(1-1)Cer); transglutaminase 5 (TGS5); high molecular weight-melanoma-associated antigen (HMWMAA); o-acetyl-GD2 ganglioside (OAcGD2); Folate receptor beta; tumor endothelial marker 1 (TEM1/CD248); tumor endothelial marker 7-related (TEM7R); claudin 6 (CLDN6); thyroid stimulating hormone receptor (TSHR); G protein-coupled receptor class C group 5, member D (GPRC5D); chromosome X open reading frame 61 (CXORF61); CD97; CD179a; anaplastic lymphoma kinase (ALK); Polysialic acid; placenta-specific 1 (PLAC1); hexasaccharide portion of globoH glycoceramide (GloboH); mammary gland differentiation antigen (NY-BR-1); uroplakin 2 (UPK2); Hepatitis A virus cellular receptor 1 (HAVCR1); adrenoceptor beta 3 (ADRB3); pannexin 3 (PANX3); G protein-coupled receptor 20 (GPR20); lymphocyte antigen 6 complex, locus K 9 (LY6K); Olfactory receptor 51E2 (OR51E2); TCR Gamma Alternate Reading Frame Protein (TARP); Wilms tumor protein (WT1); Cancer/testis antigen 1 (NY-ESO-1); Cancer/testis antigen 2 (LAGE-1a); Melanoma-associated antigen 1 (MAGE-A1); ETS translocation-variant gene 6, located on chromosome 12p (ETV6-AML); sperm protein 17 (SPA17); X Antigen Family, Member 1A (XAGE1); angiopoietin-binding cell surface receptor 2 (Tie 2); melanoma cancer testis antigen-1 (MAD-CT-1); melanoma cancer testis antigen-2 (MAD-CT-2); Fos-related antigen 1; tumor protein p53 (p53); p53 mutant; prostein; surviving; telomerase; prostate carcinoma tumor antigen-1 (PCTA-1 or Galectin 8), melanoma antigen recognized by T cells 1 (MelanA or MART1); Rat sarcoma (Ras) mutant; human Telomerase reverse transcriptase (hTERT); sarcoma translocation breakpoints; melanoma inhibitor of apoptosis (ML-IAP); ERG (transmembrane protease, serine 2 (TMPRSS2) ETS fusion gene); N-Acetyl glucosaminyl-transferase V (NA17); paired box protein Pax-3 (PAX3); Androgen receptor; Cyclin B1; v-myc avian myelocytomatosis viral oncogene neuroblastoma derived homolog (MYCN); Ras Homolog Family Member C (RhoC); Tyrosinase-related protein 2 (TRP-2); Cytochrome P450 1B1 (CYP1B1); CCCTC-Binding Factor (Zinc Finger Protein)-Like (BORIS or Brother of the Regulator of Imprinted Sites), Squamous Cell Carcinoma Antigen Recognized By T Cells 3 (SART3); Paired box protein Pax-5 (PAXS); proacrosin binding protein sp32 (OY-TES1); lymphocyte-specific protein tyrosine kinase (LCK); A kinase anchor protein 4 (AKAP-4); synovial sarcoma, X breakpoint 2 (SSX2); Receptor for Advanced Glycation Endproducts (RAGE-1); renal ubiquitous 1 (RU1); renal ubiquitous 2 (RU2); legumain; human papilloma virus E6 (HPV E6); human papilloma virus E7 (HPV E7); intestinal carboxyl esterase; heat shock protein 70-2 mutated (mut hsp70-2); CD79a; CD79b; CD72; Leukocyte-associated immunoglobulin-like receptor 1 (LAIR1); Fc fragment of IgA receptor (FCAR or CD89); Leukocyte immunoglobulin-like receptor subfamily A member 2 (LILRA2); CD300 molecule-like family member f (CD300LF); C-type lectin domain family 12 member A (CLEC12A); bone marrow stromal cell antigen 2 (BST2); EGF-like module-containing mucin-like hormone receptor-like 2 (EMR2); lymphocyte antigen 75 (LY75); Glypican-3 (GPC3); Fc receptor-like 5 (FCRLS); and immunoglobulin lambda-like polypeptide 1 (IGLL1), CD19, BCMA, CD70, G6PC, Dystrophin, including modification of exon 51 by deletion or excision, DMPK, CFTR (cystic fibrosis transmembrane conductance regulator). In embodiments, the targets comprise CD70, or a Knock-in of CD33 and Knock-out of B2M. In embodiments, the targets comprise a knockout of TRAC and B2M, or TRAC B2M and PD1, with or without additional target genes. In certain embodiments, the disease is cystic fibrosis with targeting of the SCNN1A gene, e.g., the non-coding or coding regions, e.g., a promoter region, or a transcribed sequence, e.g., intronic or exonic sequence, targeted knock-in at CFTR sequence within intron 2, into which, e.g., can be introduced CFTR sequence that codes for CFTR exons 3-27; and sequence within CFTR intron 10, into which sequence that codes for CFTR exons 11-27 can be introduced.

[1065] In embodiments, the disease is Metachromatic Leukodystrophy, and the target is Arylsulfatase A, the disease is Wiskott-Aldrich Syndrome and the target is Wiskott-Aldrich Syndrome protein, the disease is Adreno leukodystrophy and the target is ATP-binding cassette DI, the disease is Human Immunodeficiency Virus and the target is receptor type 5-C—C chemokine or CXCR4 gene, the disease is Beta-thalassemia and the target is Hemoglobin beta subunit, the disease is X-linked Severe Combined ID receptor subunit gamma and the target is interleukin-2 receptor subunit gamma, the disease is Multisystemic Lysosomal Storage Disorder cystinosis and the target is cystinosin, the disease is Diamon-Blackfan anemia and the target is Ribosomal protein S19, the disease is Fanconi Anemia and the target is Fanconi anemia complementation groups (e.g. FNACA, FNACB, FANCC, FANCD1, FANCD2, FANCE, FANCF, RAD51C), the disease is Shwachman-Bodian-Diamond Bodian-Diamond syndrome and the target is Shwachman syndrome gene, the disease is Gaucher's disease and the target is Glucocerebrosidase, the disease is Hemophilia A and the target is Anti-hemophiliac factor OR Factor VIII, Christmas factor, Serine protease, Factor Hemophilia B IX, the disease is Adenosine deaminase deficiency (ADA-SCID) and the target is Adenosine deaminase, the disease is GM1 gangliosidoses and the target is beta-galactosidase, the disease is Glycogen storage disease type II, Pompe disease, the disease is acid maltase deficiency acid and the target is alpha-glucosidase, the disease is Niemann-Pick disease, SMPD1-associated (Types Sphingomyelin phosphodiesterase 1 OR A and B) acid and the target is sphingomyelinase, the disease is Krabbe disease, globoid cell leukodystrophy and the target is Galactosylceramidase or galactosylceramide lipidosis and the target is galactercerebrosidease, Human leukocyte antigens DR-15, DQ-6, the disease is Multiple Sclerosis (MS) DRB1, the disease is Herpes Simplex Virus 1 or 2 and the target is knocking down of one, two or three of RS1, RL2 and/or LAT genes. In embodiments, the disease is an HPV associated cancer with treatment including edited cells comprising binding molecules, such as TCRs or antigen binding fragments thereof and antibodies and antigen-binding fragments thereof, such as those that recognize or bind human papilloma virus. The disease can be Hepatitis B with a target of one or more of PreC, C, X, PreS1, PreS2, S, P and/or SP gene(s).

[1066] In embodiments, the immune disease is severe combined immunodeficiency (SCID), Omenn syndrome, and in one aspect the target is Recombination Activating Gene 1 (RAG1) or an interleukin-7 receptor (IL7R). In particular embodiments, the disease is Transthyretin Amyloidosis (ATTR), Familial amyloid cardiomyopathy, and in one aspect, the target is the TTR gene, including one or more mutations in the TTR gene. In embodiments, the disease is Alpha-1 Antitrypsin Deficiency (AATD) or another disease in which Alpha-1 Antitrypsin is implicated, for example GvHD, Organ transplant rejection, diabetes, liver disease, COPD, Emphysema and Cystic Fibrosis, in particular embodiments, the target is SERPINA1.

[1067] In embodiments, the disease is primary hyperoxaluria, which, in certain embodiments, the target comprises one or more of Lactate dehydrogenase A (LDHA) and hydroxy Acid Oxidase 1 (HAO1). In embodiments, the disease is primary hyperoxaluria type 1 (ph1) and other alanine-glyoxylate aminotransferase (agxt) gene related conditions or disorders, such as Adenocarcinoma, Chronic Alcoholic Intoxication, Alzheimer's Disease, Cooley's anemia, Aneurysm, Anxiety Disorders, Asthma, Malignant neoplasm of breast, Malignant neoplasm of skin, Renal Cell Carcinoma, Cardiovascular Diseases, Malignant tumor of cervix, Coronary Arteriosclerosis, Coronary heart disease, Diabetes, Diabetes Mellitus, Diabetes Mellitus Non-Insulin-Dependent, Diabetic Nephropathy, Eclampsia, Eczema, Subacute Bacterial Endocarditis, Glioblastoma, Glycogen storage disease type II, Sensorineural Hearing Loss (disorder), Hepatitis, Hepatitis A, Hepatitis B, Homocystinuria, Hereditary Sensory Autonomic Neuropathy Type 1, Hyperaldosteronism, Hypercholesterolemia, Hyperoxaluria, Primary Hyperoxaluria, Hypertensive disease, Inflammatory Bowel Diseases, Kidney Calculi, Kidney Diseases, Chronic Kidney Failure, leiomyosarcoma, Metabolic Diseases, Inborn Errors of Metabolism, Mitral Valve Prolapse Syndrome, Myocardial Infarction, Neoplasm Metastasis, Nephrotic Syndrome, Obesity, Ovarian Diseases, Periodontitis, Polycystic Ovary Syndrome, Kidney Failure, Adult Respiratory Distress Syndrome, Retinal Diseases, Cerebrovascular accident, Turner Syndrome, Viral hepatitis, Tooth Loss, Premature Ovarian Failure, Essential Hypertension, Left Ventricular Hypertrophy, Migraine Disorders, Cutaneous Melanoma, Hypertensive heart disease, Chronic glomerulonephritis, Migraine with Aura, Secondary hypertension, Acute myocardial infarction, Atherosclerosis of aorta, Allergic asthma, pineoblastoma, Malignant neoplasm of lung, Primary hyperoxaluria type I, Primary hyperoxaluria type 2, Inflammatory Breast Carcinoma, Cervix carcinoma, Restenosis, Bleeding ulcer, Generalized glycogen storage disease of infants, Nephrolithiasis, Chronic rejection of renal transplant, Urolithiasis, pricking of skin, Metabolic Syndrome X, Maternal hypertension, Carotid Atherosclerosis, Carcinogenesis, Breast Carcinoma, Carcinoma of lung, Nephronophthisis, Microalbuminuria, Familial Retinoblastoma, Systolic Heart Failure Ischemic stroke, Left ventricular systolic dysfunction, Cauda Equina Paraganglioma, Hepatocarcinogenesis, Chronic Kidney Diseases, Glioblastoma Multiforme, Non-Neoplastic Disorder, Calcium Oxalate Nephrolithiasis, Ablepharon-Macrostomia Syndrome, Coronary Artery Disease, Liver carcinoma, Chronic kidney disease stage 5, Allergic rhinitis (disorder), Crigler Najjar syndrome type 2, and Ischemic Cerebrovascular Accident. In certain embodiments, treatment is targeted to the liver. In embodiments, the gene is AGXT, with a cytogenetic location of 2q37.3 and the genomic coordinate are on Chromosome 2 on the forward strand at position 240,868,479-240,880,502.

[1068] Treatment can also target collagen type vii alpha 1 chain (col7a1) gene related conditions or disorders, such as Malignant neoplasm of skin, Squamous cell carcinoma, Colorectal Neoplasms, Crohn Disease, Epidermolysis Bullosa, Indirect Inguinal Hernia, Pruritus, Schizophrenia, Dermatologic disorders, Genetic Skin Diseases, Teratoma, Cockayne-Touraine Disease, Epidermolysis Bullosa Acquisita, Epidermolysis Bullosa Dystrophica, Junctional Epidermolysis Bullosa, Hallopeau-Siemens Disease, Bullous Skin Diseases, Agenesis of corpus callosum, Dystrophia unguium, Vesicular Stomatitis, Epidermolysis Bullosa With Congenital Localized Absence Of Skin And Deformity Of Nails, Juvenile Myoclonic Epilepsy, Squamous cell carcinoma of esophagus, Poikiloderma of Kindler, pretibial Epidermolysis bullosa, Dominant dystrophic epidermolysis bullosa albopapular type (disorder), Localized recessive dystrophic epidermolysis bullosa, Generalized dystrophic epidermolysis bullosa, Squamous cell carcinoma of skin, Epidermolysis Bullosa Pruriginosa, Mammary Neoplasms, Epidermolysis Bullosa Simplex Superficialis, Isolated Toenail Dystrophy, Transient bullous dermolysis of the newborn, Autosomal Recessive Epidermolysis Bullosa Dystrophica Localisata Variant, and Autosomal Recessive Epidermolysis Bullosa Dystrophica Inversa.

[1069] In embodiments, the disease is acute myeloid leukemia (AML), targeting Wilms Tumor I (WTI) and HLA expressing cells. In embodiments, the therapy is T cell therapy, as described elsewhere herein, comprising engineered T cells with WTI specific TCRs. In certain embodiments, the target is CD157 in AML.

[1070] In embodiments, the disease is a blood disease. In certain embodiments, the disease is hemophilia, in one aspect the target is Factor XI. In other embodiments, the disease is a hemoglobinopathy, such as sickle cell disease, sickle cell trait, hemoglobin C disease, hemoglobin C trait, hemoglobin S/C disease, hemoglobin D disease, hemoglobin E disease, a thalassemia, a condition associated with hemoglobin with increased oxygen affinity, a condition associated with hemoglobin with decreased oxygen affinity, unstable hemoglobin disease, methemoglobinemia. Hemostasis and Factor X and XII deficiencies can also be treated. In embodiments, the target is BCL11A gene (e.g., a human BCL11a gene), a BCL11a enhancer (e.g., a human BCL11a enhancer), or a HFPH region (e.g., a human HPFH region), beta globulin, fetal hemoglobin, γ-globin genes (e.g., HBG1, HBG2, or HBG1 and HBG2), the erythroid specific enhancer of the BCL11A gene (BCL11Ae), or a combination thereof.

[1071] In embodiments, the target locus can be one or more of RAC, TRBC1, TRBC2, CD3E, CD3G, CD3D, B2M, CIITA, CD247, HLA-A, HLA-B, HLA-C, DCK, CD52, FKBP1A, NLRC5, RFXANK, RFX5, RFXAP, NR3C1, CD274, HAVCR2, LAG3, PDCD1, PD-L2, HCF2, PAI, TFPI, PLAT, PLAU, PLG, RPOZ, F7, F8, F9, F2, F5, F7, F10, F11, F12, F13A1, F13B, STAT1, FOXP3, IL2RG, DCLRE1C, ICOS, MHC2TA, GALNS, HGSNAT, ARSB, RFXAP, CD20, CD81, TNFRSF13B, SEC23B, PKLR, IFNG, SPTB, SPTA, SLC4A1, EPO, EPB42, CSF2 CSF3, VFW, SERPINCA1, CTLA4, CEACAM (e.g., CEACAM-1, CEACAM-3 and/or CEACAM-5), VISTA, BTLA, TIGIT, LAIR1, CD160, 2B4, CD80, CD86, B7-H3 (CD113), B7-H4 (VTCN1), HVEM (TNFRSF14 or CD107), KIR, A2aR, MEW class I, MEW class II, GALS, adenosine, and TGF beta, PTPN11, and combinations thereof. In embodiments, the target sequence within the genomic nucleic acid sequence at Chr1 1:5,250,094-5,250,237,—strand, hg38; Chr1 1:5,255,022-5,255,164,—strand, hg38; nondeletional HFPH region; Chr1 1:5,249,833 to Chr1 1:5,250,237,—strand, hg38; Chr1 1:5,254,738 to Chr1 1:5,255, 164,—strand, hg38; Chr1 1:5,249,833-5,249,927,—strand, hg3; Chr1 1:5,254,738-5,254,851,—strand, hg38; Chr1 1:5,250, 139-5,250,237,—strand, hg38.

[1072] In embodiments, the disease is associated with high cholesterol, and regulation of cholesterol is provided, in some embodiments, regulation is effected by modification in the target PCSK9. Other diseases in which PCSK9 can be implicated, and thus would be a target for the systems and methods described herein include Abetaiipoproteinemia, Adenoma, Arteriosclerosis, Atherosclerosis, Cardiovascular Diseases, Cholelithiasis, Coronary Arteriosclerosis, Coronary heart disease, Non-Insulin-Dependent Diabetes Meliitus, Hypercholesterolemia, Familial Hypercholesterolemia, Hyperinsuiinism, Hyperlipidemia, Familial Combined Hyperlipidemia, Hypobetalipoproteinemias, Chronic Kidney Failure, Liver diseases, Liver neoplasms, melanoma, Myocardial Infarction, Narcolepsy, Neoplasm Metastasis, Nephroblastoma, Obesity, Peritonitis, Pseudoxanthoma Elasticum, Cerebrovascular accident, Vascular Diseases, Xanthomatosis, Peripheral Vascular Diseases, Myocardial Ischemia, Dyslipidemias, Impaired glucose tolerance, Xanthoma, Polygenic hypercholesterolemia, Secondary malignant neoplasm of liver, Dementia, Overweight, Hepatitis C, Chronic, Carotid Atherosclerosis, Hyperlipoproteinemia Type Ha, Intracranial Atherosclerosis, Ischemic stroke, Acute Coronary Syndrome, Aortic calcification, Cardiovascular morbidity, Hyperlipoproteinemia Type lib, Peripheral Arterial Diseases, Familial Hyperaldosteronism Type II, Familial hypobetalipoproteinemia, Autosomal Recessive Hypercholesterolemia, Autosomal Dominant Hypercholesterolemia 3, Coronary Artery Disease, Liver carcinoma, Ischemic Cerebrovascular Accident, and Arteriosclerotic cardiovascular disease NOS. In embodiments, the treatment can be targeted to the liver, the primary location of activity of PCSK9.

[1073] In embodiments, the disease or disorder is Hyper IGM syndrome or a disorder characterized by defective CD40 signaling. In certain embodiments, the insertion of CD40L exons are used to restore proper CD40 signaling and B cell class switch recombination. In particular embodiments, the target is CD40 ligand (CD40L)-edited at one or more of exons 2-5 of the CD40L gene, in cells, e.g., T cells or hematopoietic stem cells (HSCs).

[1074] In embodiments, the disease is merosin-deficient congenital muscular dystrophy (mdcmd) and other laminin, alpha 2 (lama2) gene related conditions or disorders. The therapy can be targeted to the muscle, for example, skeletal muscle, smooth muscle, and/or cardiac muscle. In certain embodiments, the target is Laminin, Alpha 2 (LAMA2) which may also be referred to as Laminin-12 Subunit Alpha, Laminin-2 Subunit Alpha, Laminin-4 Subunit Alpha 3, Merosin Heavy Chain, Laminin M Chain, LAMM, Congenital Muscular Dystrophy and Merosin. LAMA2 has a cytogenetic location of 6q22.33 and the genomic coordinate are on Chromosome 6 on the forward strand at position 128,883, 141-129,516,563. In embodiments, the disease treated can be Merosin-Deficient Congenital Muscular Dystrophy (MDCMD), Amyotrophic Lateral Sclerosis, Bladder Neoplasm, Charcot-Marie-Tooth Disease, Colorectal Carcinoma, Contracture, Cyst, Duchenne Muscular Dystrophy, Fatigue, Hyperopia, Renovascular Hypertension, melanoma, Mental Retardation, Myopathy, Muscular Dystrophy, Myopia, Myositis, Neuromuscular Diseases, Peripheral Neuropathy, Refractive Errors, Schizophrenia, Severe mental retardation (I.Q. 20-34), Thyroid Neoplasm, Tobacco Use Disorder, Severe Combined Immunodeficiency, Synovial Cyst, Adenocarcinoma of lung (disorder), Tumor Progression, Strawberry nevus of skin, Muscle degeneration, Microdontia (disorder), Walker-Warburg congenital muscular dystrophy, Chronic Periodontitis, Leukoencephalopathies, Impaired cognition, Fukuyama Type Congenital Muscular Dystrophy, Scleroatonic muscular dystrophy, Eichsfeld type congenital muscular dystrophy, Neuropathy, Muscle eye brain disease, Limb-Muscular Dystrophies, Girdle, Congenital muscular dystrophy (disorder), Muscle fibrosis, cancer recurrence, Drug Resistant Epilepsy, Respiratory Failure, Myxoid cyst, Abnormal breathing, Muscular dystrophy congenital merosin negative, Colorectal Cancer, Congenital Muscular Dystrophy due to Partial LAMA2 Deficiency, and Autosomal Dominant Craniometaphyseal Dysplasia.

[1075] In certain embodiments, the target is an AAVS1 (PPPIR12C), an ALB gene, an Angpt13 gene, an ApoC3 gene, an ASGR2 gene, a CCR5 gene, a FIX (F9) gene, a G6PC gene, a Gys2 gene, an HGD gene, a Lp(a) gene, a Pcsk9 gene, a Serpinal gene, a TF gene, and a TTR gene). Assessment of efficiency of HDR/NHEJ mediated knock-in of cDNA into the first exon can utilize cDNA knock-in into “safe harbor” sites such as: single-stranded or double-stranded DNA having homologous arms to one of the following regions, for example: ApoC3 (chr11:116829908-116833071), Angpt13 (chr1:62,597,487-62,606,305), Serpinal (chr14:94376747-94390692), Lp(a) (chr6:160531483-160664259), Pcsk9 (chr1:55,039,475-55,064,852), FIX (chrX:139,530,736-139,563,458), ALB (chr4:73,404,254-73,421,411), TTR (chr1 8:31,591,766-31,599,023), TF (chr3:133,661,997-133,779,005), G6PC (chr17:42,900,796-42,914,432), Gys2 (chr12:21,536,188-21,604,857), AAVS1 (PPP1R12C) (chr19:55,090,912-55,117,599), HGD (chr3:120,628,167-120,682,570), CCR5 (chr3:46,370,854-46,376,206), or ASGR2 (chr17:7,101,322-7,114,310).

[1076] In one aspect, the target is superoxide dismutase 1, soluble (SOD1), which can aid in treatment of a disease or disorder associated with the gene. In particular embodiments, the disease or disorder is associated with SOD1, and can be, for example, Adenocarcinoma, Albuminuria, Chronic Alcoholic Intoxication, Alzheimer's Disease, Amnesia, Amyloidosis, Amyotrophic Lateral Sclerosis, Anemia, Autoimmune hemolytic anemia, Sickle Cell Anemia, Anoxia, Anxiety Disorders, Aortic Diseases, Arteriosclerosis, Rheumatoid Arthritis, Asphyxia Neonatorum, Asthma, Atherosclerosis, Autistic Disorder, Autoimmune Diseases, Barrett Esophagus, Behcet Syndrome, Malignant neoplasm of urinary bladder, Brain Neoplasms, Malignant neoplasm of breast, Oral candidiasis, Malignant tumor of colon, Bronchogenic Carcinoma, Non-Small Cell Lung Carcinoma, Squamous cell carcinoma, Transitional Cell Carcinoma, Cardiovascular Diseases, Carotid Artery Thrombosis, Neoplastic Cell Transformation, Cerebral Infarction, Brain Ischemia, Transient Ischemic Attack, Charcot-Marie-Tooth Disease, Cholera, Colitis, Colorectal Carcinoma, Coronary Arteriosclerosis, Coronary heart disease, Infection by Cryptococcus neoformans, Deafness, Cessation of life, Deglutition Disorders, Presenile dementia, Depressive disorder, Contact Dermatitis, Diabetes, Diabetes Mellitus, Experimental Diabetes Mellitus, Insulin-Dependent Diabetes Mellitus, Non-Insulin-Dependent Diabetes Mellitus, Diabetic Angiopathies, Diabetic Nephropathy, Diabetic Retinopathy, Down Syndrome, Dwarfism, Edema, Japanese Encephalitis, Toxic Epidermal Necrolysis, Temporal Lobe Epilepsy, Exanthema, Muscular fasciculation, Alcoholic Fatty Liver, Fetal Growth Retardation, Fibromyalgia, Fibrosarcoma, Fragile X Syndrome, Giardiasis, Glioblastoma, Glioma, Headache, Partial Hearing Loss, Cardiac Arrest, Heart failure, Atrial Septal Defects, Helminthiasis, Hemochromatosis, Hemolysis (disorder), Chronic Hepatitis, HIV Infections, Huntington Disease, Hypercholesterolemia, Hyperglycemia, Hyperplasia, Hypertensive disease, Hyperthyroidism, Hypopituitarism, Hypoproteinemia, Hypotension, natural Hypothermia, Hypothyroidism, Immunologic Deficiency Syndromes, Immune System Diseases, Inflammation, Inflammatory Bowel Diseases, Influenza, Intestinal Diseases, Ischemia, Kearns-Sayre syndrome, Keratoconus, Kidney Calculi, Kidney Diseases, Acute Kidney Failure, Chronic Kidney Failure, Polycystic Kidney Diseases, leukemia, Myeloid Leukemia, Acute Promyelocytic Leukemia, Liver Cirrhosis, Liver diseases, Liver neoplasms, Locked-In Syndrome, Chronic Obstructive Airway Disease, Lung Neoplasms, Systemic Lupus Erythematosus, Non-Hodgkin Lymphoma, Machado-Joseph Disease, Malaria, Malignant neoplasm of stomach, Animal Mammary Neoplasms, Marfan Syndrome, Meningomyelocele, Mental Retardation, Mitral Valve Stenosis, Acquired Dental Fluorosis, Movement Disorders, Multiple Sclerosis, Muscle Rigidity, Muscle Spasticity, Muscular Atrophy, Spinal Muscular Atrophy, Myopathy, Mycoses, Myocardial Infarction, Myocardial Reperfusion Injury, Necrosis, Nephrosis, Nephrotic Syndrome, Nerve Degeneration, nervous system disorder, Neuralgia, Neuroblastoma, Neuroma, Neuromuscular Diseases, Obesity, Occupational Diseases, Ocular Hypertension, Oligospermia, Degenerative polyarthritis, Osteoporosis, Ovarian Carcinoma, Pain, Pancreatitis, Papillon-Lefevre Disease, Paresis, Parkinson Disease, Phenylketonurias, Pituitary Diseases, Pre-Eclampsia, Prostatic Neoplasms, Protein Deficiency, Proteinuria, Psoriasis, Pulmonary Fibrosis, Renal Artery Obstruction, Reperfusion Injury, Retinal Degeneration, Retinal Diseases, Retinoblastoma, Schistosomiasis, Schistosomiasis mansoni, Schizophrenia, Scrapie, Seizures, Age-related cataract, Compression of spinal cord, Cerebrovascular accident, Subarachnoid Hemorrhage, Progressive supranuclear palsy, Tetanus, Trisomy, Turner Syndrome, Unipolar Depression, Urticaria, Vitiligo, Vocal Cord Paralysis, Intestinal Volvulus, Weight Gain, HMN (Hereditary Motor Neuropathy) Proximal Type I, Holoprosencephaly, Motor Neuron Disease, Neurofibrillary degeneration (morphologic abnormality), Burning sensation, Apathy, Mood swings, Synovial Cyst, Cataract, Migraine Disorders, Sciatic Neuropathy, Sensory neuropathy, Atrophic condition of skin, Muscle Weakness, Esophageal carcinoma, Lingual-Facial-Buccal Dyskinesia, Idiopathic pulmonary hypertension, Lateral Sclerosis, Migraine with Aura, Mixed Conductive-Sensorineural Hearing Loss, Iron deficiency anemia, Malnutrition, Prion Diseases, Mitochondrial Myopathies, MELAS Syndrome, Chronic progressive external ophthalmoplegia, General Paralysis, Premature aging syndrome, Fibrillation, Psychiatric symptom, Memory impairment, Muscle degeneration, Neurologic Symptoms, Gastric hemorrhage, Pancreatic carcinoma, Pick Disease of the Brain, Liver Fibrosis, Malignant neoplasm of lung, Age related macular degeneration, Parkinsonian Disorders, Disease Progression, Hypocupremia, Cytochrome-c Oxidase Deficiency, Essential Tremor, Familial Motor Neuron Disease, Lower Motor Neuron Disease, Degenerative myelopathy, Diabetic Polyneuropathies, Liver and Intrahepatic Biliary Tract Carcinoma, Persian Gulf Syndrome, Senile Plaques, Atrophic, Frontotemporal dementia, Semantic Dementia, Common Migraine, Impaired cognition, Malignant neoplasm of liver, Malignant neoplasm of pancreas, Malignant neoplasm of prostate, Pure Autonomic Failure, Motor symptoms, Spastic, Dementia, Neurodegenerative Disorders, Chronic Hepatitis C, Guam Form Amyotrophic Lateral Sclerosis, Stiff limbs, Multisystem disorder, Loss of scalp hair, Prostate carcinoma, Hepatopulmonary Syndrome, Hashimoto Disease, Progressive Neoplastic Disease, Breast Carcinoma, Terminal illness, Carcinoma of lung, Tardive Dyskinesia, Secondary malignant neoplasm of lymph node, Colon Carcinoma, Stomach Carcinoma, Central neuroblastoma, Dissecting aneurysm of the thoracic aorta, Diabetic macular edema, Microalbuminuria, Middle Cerebral Artery Occlusion, Middle Cerebral Artery Infarction, Upper motor neuron signs, Frontotemporal Lobar Degeneration, Memory Loss, Classical phenylketonuria, CADASIL Syndrome, Neurologic Gait Disorders, Spinocerebellar Ataxia Type 2, Spinal Cord Ischemia, Lewy Body Disease, Muscular Atrophy, Spinobulbar, Chromosome 21 monosomy, Thrombocytosis, Spots on skin, Drug-Induced Liver Injury, Hereditary Leber Optic Atrophy, Cerebral Ischemia, ovarian neoplasm, Tauopathies, Macroangiopathy, Persistent pulmonary hypertension, Malignant neoplasm of ovary, Myxoid cyst, Drusen, Sarcoma, Weight decreased, Major Depressive Disorder, Mild cognitive disorder, Degenerative disorder, Partial Trisomy, Cardiovascular morbidity, hearing impairment, Cognitive changes, Ureteral Calculi, Mammary Neoplasms, Colorectal Cancer, Chronic Kidney Diseases, Minimal Change Nephrotic Syndrome, Non-Neoplastic Disorder, X-Linked Bulbo-Spinal Atrophy, Mammographic Density, Normal Tension Glaucoma Susceptibility To Finding), Vitiligo-Associated Multiple Autoimmune Disease Susceptibility 1 (Finding), Amyotrophic Lateral Sclerosis And/Or Frontotemporal Dementia 1, Amyotrophic Lateral Sclerosis 1, Sporadic Amyotrophic Lateral Sclerosis, monomelic Amyotrophy, Coronary Artery Disease, Transformed migraine, Regurgitation, Urothelial Carcinoma, Motor disturbances, Liver carcinoma, Protein Misfolding Disorders, TDP-43 Proteinopathies, Promyelocytic leukemia, Weight Gain Adverse Event, Mitochondrial cytopathy, Idiopathic pulmonary arterial hypertension, Progressive cGVHD, Infection, GRN-related frontotemporal dementia, Mitochondrial pathology, and Hearing Loss.

[1077] In particular embodiments, the disease is associated with the gene ATXN1, ATXN2, or ATXN3, which may be targeted for treatment. In some embodiments, the CAG repeat region located in exon 8 of ATXN1, exon 1 of ATXN2, or exon 10 of the ATXN3 is targeted. In embodiments, the disease is spinocerebellar ataxia 3 (sca3), sca1, or sca2 and other related disorders, such as Congenital Abnormality, Alzheimer's Disease, Amyotrophic Lateral Sclerosis, Ataxia, Ataxia Telangiectasia, Cerebellar Ataxia, Cerebellar Diseases, Chorea, Cleft Palate, Cystic Fibrosis, Mental Depression, Depressive disorder, Dystonia, Esophageal Neoplasms, Exotropia, Cardiac Arrest, Huntington Disease, Machado-Joseph Disease, Movement Disorders, Muscular Dystrophy, Myotonic Dystrophy, Narcolepsy, Nerve Degeneration, Neuroblastoma, Parkinson Disease, Peripheral Neuropathy, Restless Legs Syndrome, Retinal Degeneration, Retinitis Pigmentosa, Schizophrenia, Shy-Drager Syndrome, Sleep disturbances, Hereditary Spastic Paraplegia, Thromboembolism, Stiff-Person Syndrome, Spinocerebellar Ataxia, Esophageal carcinoma, Polyneuropathy, Effects of heat, Muscle twitch, Extrapyramidal sign, Ataxic, Neurologic Symptoms, Cerebral atrophy, Parkinsonian Disorders, Protein S Deficiency, Cerebellar degeneration, Familial Amyloid Neuropathy Portuguese Type, Spastic syndrome, Vertical Nystagmus, Nystagmus End-Position, Antithrombin III Deficiency, Atrophic, Complicated hereditary spastic paraplegia, Multiple System Atrophy, Pallidoluysian degeneration, Dystonia Disorders, Pure Autonomic Failure, Thrombophilia, Protein C, Deficiency, Congenital Myotonic Dystrophy, Motor symptoms, Neuropathy, Neurodegenerative Disorders, Malignant neoplasm of esophagus, Visual disturbance, Activated Protein C Resistance, Terminal illness, Myokymia, Central neuroblastoma, Dyssomnias, Appendicular Ataxia, Narcolepsy-Cataplexy Syndrome, Machado-Joseph Disease Type I, Machado-Joseph Disease Type II, Machado-Joseph Disease Type III, Dentatorubral-Pallidoluysian Atrophy, Gait Ataxia, Spinocerebellar Ataxia Type 1, Spinocerebellar Ataxia Type 2, Spinocerebellar Ataxia Type 6 (disorder), Spinocerebellar Ataxia Type 7, Muscular Spinobulbar Atrophy, Genomic Instability, Episodic ataxia type 2 (disorder), Bulbo-Spinal Atrophy X-Linked, Fragile X Tremor/Ataxia Syndrome, Thrombophilia Due to Activated Protein C Resistance (Disorder), Amyotrophic Lateral Sclerosis 1, Neuronal Intranuclear Inclusion Disease, Hereditary Antithrombin Iii Deficiency, and Late-Onset Parkinson Disease.

[1078] In embodiments, the disease is associated with expression of a tumor antigen-cancer or non-cancer related indication, for example acute lymphoid leukemia, diffuse large B cell lymphoma, follicular lymphoma, chronic lymphocytic leukemia, Hodgkin lymphoma, non-Hodgkin lymphoma. In embodiments, the target can be TET2 intron, a TET2 intron-exon junction, a sequence within a genomic region of chr4.

[1079] In embodiments, neurodegenerative diseases can be treated. In particular embodiments, the target is Synuclein, Alpha (SNCA). In certain embodiments, the disorder treated is a pain related disorder, including congenital pain insensitivity, Compressive Neuropathies, Paroxysmal Extreme Pain Disorder, High grade atrioventricular block, Small Fiber Neuropathy, and Familial Episodic Pain Syndrome 2. In certain embodiments, the target is Sodium Channel, Voltage Gated, Type X Alpha Subunit (SCNIOA).

[1080] In certain embodiments, hematopoietic stem cells and progenitor stem cells are edited, including knock-ins. In particular embodiments, the knock-in is for treatment of lysosomal storage diseases, glycogen storage diseases, mucopolysaccharoidoses, or any disease in which the secretion of a protein will ameliorate the disease. In one embodiment, the disease is sickle cell disease (SCD). In another embodiment, the disease is β-thalessemia.

[1081] In certain embodiments, the T cell or NK cell is used for cancer treatment and may include T cells comprising the recombinant receptor (e.g. CAR) and one or more phenotypic markers selected from CCR7+, 4-1BB+(CD137+), TIM3+, CD27+, CD62L+, CD127+, CD45RA+, CD45RO−, t-betl'w, IL-7Ra+, CD95+, IL-2RP+, CXCR3+ or LFA-1+. In certain embodiments the editing of a T cell for caner immunotherapy comprises altering one or more T-cell expressed gene, e.g., one or more of FAS, BID, CTLA4, PDCD1, CBLB, PTPN6, B2M, TRAC and TRBC gene. In some embodiments, editing includes alterations introduced into, or proximate to, the CBLB target sites to reduce CBLB gene expression in T cells for treatment of proliferative diseases and may include larger insertions or deletions at one or more CBLB target sites. T cell editing of TGFBR2 target sequence can be, for example, located in exon 3, 4, or 5 of the TGFBR2 gene and utilized for cancers and lymphoma treatment.

[1082] Cells for transplantation can be edited and may include allele-specific modification of one or more immunogenicity genes (e.g., an HLA gene) of a cell, e.g., HLA-A, HLA-B, HLA-C, HLA-DRB1, HLA-DRB3/4/5, HLA-DQ, and HLA-DP MiHAs, and any other MHC Class I or Class II genes or loci, which may include delivery of one or more matched recipient HLA alleles into the original position(s) where the one or more mismatched donor HLA alleles are located, and may include inserting one or more matched recipient HLA alleles into a “safe harbor” locus. In an embodiment, the method further includes introducing a chemotherapy resistance gene for in vivo selection in a gene.

[1083] Methods and systems can target Dystrophia Myotonica-Protein Kinase (DMPK) for editing, in particular embodiments, the target is the CTG trinucleotide repeat in the 3′ untranslated region (UTR) of the DMPK gene. Disorders or diseases associated with DMPK include Atherosclerosis, Azoospermia, Hypertrophic Cardiomyopathy, Celiac Disease, Congenital chromosomal disease, Diabetes Mellitus, Focal glomerulosclerosis, Huntington Disease, Hypogonadism, Muscular Atrophy, Myopathy, Muscular Dystrophy, Myotonia, Myotonic Dystrophy, Neuromuscular Diseases, Optic Atrophy, Paresis, Schizophrenia, Cataract, Spinocerebellar Ataxia, Muscle Weakness, Adrenoleukodystrophy, Centronuclear myopathy, Interstitial fibrosis, myotonic muscular dystrophy, Abnormal mental state, X-linked Charcot-Marie-Tooth disease 1, Congenital Myotonic Dystrophy, Bilateral cataracts (disorder), Congenital Fiber Type Disproportion, Myotonic Disorders, Multisystem disorder, 3-Methylglutaconic aciduria type 3, cardiac event, Cardiogenic Syncope, Congenital Structural Myopathy, Mental handicap, Adrenomyeloneuropathy, Dystrophia myotonica 2, and Intellectual Disability.

[1084] In embodiments, the disease is an inborn error of metabolism. The disease may be selected from Disorders of Carbohydrate Metabolism (glycogen storage disease, G6PD deficiency), Disorders of Amino Acid Metabolism (phenylketonuria, maple syrup urine disease, glutaric acidemia type 1), Urea Cycle Disorder or Urea Cycle Defects (carbamoyl phosphate synthease I deficiency), Disorders of Organic Acid Metabolism (alkaptonuria, 2-hydroxyglutaric acidurias), Disorders of Fatty Acid Oxidation/Mitochondrial Metabolism (Medium-chain acyl-coenzyme A dehydrogenase deficiency), Disorders of Porphyrin metabolism (acute intermittent porphyria), Disorders of Purine/Pyrimidine Metabolism (Lesch-Nynan syndrome), Disorders of Steroid Metabolism (lipoid congenital adrenal hyperplasia, congenital adrenal hyperplasia), Disorders of Mitochondrial Function (Kearns-Sayre syndrome), Disorders of Peroxisomal function (Zellweger syndrome), or Lysosomal Storage Disorders (Gaucher's disease, Niemann-Pick disease).

[1085] In embodiments, the target can comprise Recombination Activating Gene 1 (RAG1), BCL11 A, PCSK9, laminin, alpha 2 (lama2), ATXN3, alanine-glyoxylate aminotransferase (AGXT), collagen type vii alpha 1 chain (COL7a1), spinocerebellar ataxia type 1 protein (ATXN1), Angiopoietin-like 3 (ANGPTL3), Frataxin (FXN), Superoxidase Dismutase 1, soluble (SOD1), Synuclein, Alpha (SNCA), Sodium Channel, Voltage Gated, Type X Alpha Subunit (SCN10A), Spinocerebellar Ataxia Type 2 Protein (ATXN2), Dystrophia Myotonica-Protein Kinase (DMPK), beta globin locus on chromosome 11, acyl-coenzyme A dehydrogenase for medium chain fatty acids (ACADM), long-chain 3-hydroxyl-coenzyme A dehydrogenase for long chain fatty acids (HADHA), acyl-coenzyme A dehydrogenase for very long-chain fatty acids (ACADVL), Apolipoprotein C3 (APOCIII), Transthyretin (TTR), Angiopoietin-like 4 (ANGPTL4), Sodium Voltage-Gated Channel Alpha Subunit 9 (SCN9A), Interleukin-7 receptor (IL7R), glucose-6-phosphatase, catalytic (G6PC), haemochromatosis (HFE), SERPINA1, C90RF72, β-globin, dystrophin, γ-globin.

[1086] In certain embodiments, the disease or disorder is associated with Apolipoprotein C3 (APOCIII), which can be targeted for editing. In embodiments, the disease or disorder may be Dyslipidemias, Hyperalphalipoproteinemia Type 2, Lupus Nephritis, Wilms Tumor 5, Morbid obesity and spermatogenic, Glaucoma, Diabetic Retinopathy, Arthrogryposis renal dysfunction cholestasis syndrome, Cognition Disorders, Altered response to myocardial infarction, Glucose Intolerance, Positive regulation of triglyceride biosynthetic process, Renal Insufficiency, Chronic, Hyperlipidemias, Chronic Kidney Failure, Apolipoprotein C-III Deficiency, Coronary Disease, Neonatal Diabetes Mellitus, Neonatal, with Congenital Hypothyroidism, Hypercholesterolemia Autosomal Dominant 3, Hyperlipoproteinemia Type III, Hyperthyroidism, Coronary Artery Disease, Renal Artery Obstruction, Metabolic Syndrome X, Hyperlipidemia, Familial Combined, Insulin Resistance, Transient infantile hypertriglyceridemia, Diabetic Nephropathies, Diabetes Mellitus (Type 1), Nephrotic Syndrome Type 5 with or without ocular abnormalities, and Hemorrhagic Fever with renal syndrome.

[1087] In certain embodiments, the target is Angiopoietin-like 4(ANGPTL4). Diseases or disorders associated with ANGPTL4 that can be treated include ANGPTL4 is associated with dyslipidemias, low plasma triglyceride levels, regulator of angiogenesis and modulate tumorigenesis, and severe diabetic retinopathy. both proliferative diabetic retinopathy and non-proliferative diabetic retinopathy.

[1088] In embodiments, editing can be used for the treatment of fatty acid disorders. In certain embodiments, the target is one or more of ACADM, HADHA, ACADVL. In embodiments, the targeted edit is the activity of a gene in a cell selected from the acyl-coenzyme A dehydrogenase for medium chain fatty acids (ACADM) gene, the long-chain 3-hydroxyl-coenzyme A dehydrogenase for long chain fatty acids (HADHA) gene, and the acyl-coenzyme A dehydrogenase for very long-chain fatty acids (ACADVL) gene. In one aspect, the disease is medium chain acyl-coenzyme A dehydrogenase deficiency (MCADD), long-chain 3-hydroxyl-coenzyme A dehydrogenase deficiency (LCHADD), and/or very long-chain acyl-coenzyme A dehydrogenase deficiency (VLCADD).

### Immune Orthogonal Orthologs

[1089] In some embodiments, when CRISPR enzymes need to be expressed or administered in a subject, immunogenicity of CRISPR enzymes may be reduced by sequentially expressing or administering immune orthogonal orthologs of the CRISPR enzymes to the subject. As used herein, the term “immune orthogonal orthologs” refer to orthologous proteins that have similar or substantially the same function or activity, but have no or low cross-reactivity with the immune response generated by one another. In some embodiments, sequential expression or administration of such orthologs elicits low or no secondary immune response. The immune orthogonal orthologs can avoid being neutralized by antibodies (e.g., existing antibodies in the host before the orthologs are expressed or administered). Cells expressing the orthologs can avoid being cleared by the host's immune system (e.g., by activated CTLs). In some examples, CRISPR enzyme orthologs from different species may be immune orthogonal orthologs.

[1090] Immune orthogonal orthologs may be identified by analyzing the sequences, structures, and/or immunogenicity of a set of candidates orthologs. In an example method, a set of immune orthogonal orthologs may be identified by a) comparing the sequences of a set of candidate orthologs (e.g., orthologs from different species) to identify a subset of candidates that have low or no sequence similarity; b) assessing immune overlap among the members of the subset of candidates to identify candidates that have no or low immune overlap. In some cases, immune overlap among candidates may be assessed by determining the binding (e.g., affinity) between a candidate ortholog and MEW (e.g., MEW type I and/or MEW II) of the host. Alternatively or additionally, immune overlap among candidates may be assessed by determining B-cell epitopes for the candidate orthologs. In one example, immune orthogonal orthologs may be identified using the method described in Moreno A M et al., BioRxiv, published online Jan. 10, 2018, doi: doi.org/10.1101/245985.

### Patient-Specific Screening Methods

[1091] A nucleic acid-targeting system that targets RNA can be used to screen patients or patient samples for the presence of particular RNA.

### Transcript Detection Methods

[1092] The effector proteins and systems of the invention are useful for specific detection of RNAs in a cell or other sample. In the presence of an RNA target of interest, guide-dependent CRISPR-Cas nuclease activity may be accompanied by non-specific RNAse activity against collateral targets. To take advantage of the RNase activity, all that is needed is a reporter substrate that can be detectably cleaved. For example, a reporter molecule can comprise RNA, tagged with a fluorescent reporter molecule (fluor) on one end and a quencher on the other. In the absence of CRISPR-Cas RNase activity, the physical proximity of the quencher dampens fluorescence from the fluor to low levels. When CRISPR-Cas target specific cleavage is activated by the presence of an RNA target-of-interest and suitable guide RNA, the RNA-containing reporter molecule is non-specifically cleaved and the fluor and quencher are spatially separated. This causes the fluor to emit a detectable signal when excited by light of the appropriate wavelength. In one exemplary assay method, CRISPR-Cas effector, target-of-interest-specific guide RNA, and reporter molecule are added to a cellular sample. An increase in fluorescence indicates the presence of the RNA target-of-interest. In another exemplary method, a detection array is provided. Each location of the array is provided with CRISPR-Cas effector, reporter molecule, and a target-of-interest-specific guide RNA. Depending on the assay to be performed, the target-of-interest-specific guide RNAs at each location of the array can be the same, different, or a combination thereof. Different target-of-interest-specific guide RNAs might be provided, for example when it is desired to test for one or more targets in a single source sample. The same target-of-interest-specific guide RNA might be provided at each location, for example when it is desired to test multiple samples for the same target.

[1093] In certain embodiments, CRISPR-Cas is provided or expressed in an in vitro system or in a cell, transiently or stably, and targeted or triggered to non-specifically cleave cellular nucleic acids. In one embodiment, CRISPR-Cas is engineered to knock down ssDNA, for example viral ssDNA. In another embodiment, CRISPR-Cas is engineered to knock down RNA. The system can be devised such that the knockdown is dependent on a target DNA present in the cell or in vitro system, or triggered by the addition of a target nucleic acid to the system or cell.

[1094] In an embodiment, the CRISPR-Cas system is engineered to non-specifically cleave RNA in a subset of cells distinguishable by the presence of an aberrant DNA sequence, for instance where cleavage of the aberrant DNA might be incomplete or ineffectual. In one non-limiting example, a DNA translocation that is present in a cancer cell and drives cell transformation is targeted. Whereas a subpopulation of cells that undergoes chromosomal DNA and repair may survive, non-specific collateral ribonuclease activity advantageously leads to cell death of potential survivors.

### Additional Aspects of Application

[1095] The invention has a broad spectrum of applications in, e.g., gene therapy, drug screening, disease diagnosis, and prognosis.

[1096] The terms “polynucleotide”, “nucleotide”, “nucleotide sequence”, “nucleic acid” and “oligonucleotide” are used interchangeably. They refer to a polymeric form of nucleotides of any length, either deoxyribonucleotides or ribonucleotides, or analogs thereof. Polynucleotides may have any three dimensional structure, and may perform any function, known or unknown. The following are non-limiting examples of polynucleotides: coding or non-coding regions of a gene or gene fragment, loci (locus) defined from linkage analysis, exons, introns, messenger RNA (mRNA), transfer RNA, ribosomal RNA, short interfering RNA (siRNA), short-hairpin RNA (shRNA), micro-RNA (miRNA), ribozymes, cDNA, recombinant polynucleotides, branched polynucleotides, plasmids, vectors, isolated DNA of any sequence, isolated RNA of any sequence, nucleic acid probes, and primers. The term also encompasses nucleic-acid-like structures with synthetic backbones, see, e.g., Eckstein, 1991; Baserga et al., 1992; Milligan, 1993; WO 97/03211; WO 96/39154; Mata, 1997; Strauss-Soukup, 1997; and Samstag, 1996. A polynucleotide may comprise one or more modified nucleotides, such as methylated nucleotides and nucleotide analogs. If present, modifications to the nucleotide structure may be imparted before or after assembly of the polymer. The sequence of nucleotides may be interrupted by non-nucleotide components. A polynucleotide may be further modified after polymerization, such as by conjugation with a labeling component. As used herein the term “wild type” is a term of the art understood by skilled persons and means the typical form of an organism, strain, gene or characteristic as it occurs in nature as distinguished from mutant or variant forms. A “wild type” can be a base line. As used herein the term “variant” should be taken to mean the exhibition of qualities that have a pattern that deviates from what occurs in nature. The terms “non-naturally occurring” or “engineered” are used interchangeably and indicate the involvement of the hand of man. The terms, when referring to nucleic acid molecules or polypeptides mean that the nucleic acid molecule or the polypeptide is at least substantially free from at least one other component with which they are naturally associated in nature and as found in nature. “Complementarity” refers to the ability of a nucleic acid to form hydrogen bond(s) with another nucleic acid sequence by either traditional Watson-Crick base pairing or other non-traditional types. A percent complementarity indicates the percentage of residues in a nucleic acid molecule which can form hydrogen bonds (e.g., Watson-Crick base pairing) with a second nucleic acid sequence (e.g., 5, 6, 7, 8, 9, 10 out of 10 being 50%, 60%, 70%, 80%, 90%, and 100% complementary). “Perfectly complementary” means that all the contiguous residues of a nucleic acid sequence will hydrogen bond with the same number of contiguous residues in a second nucleic acid sequence. “Substantially complementary” as used herein refers to a degree of complementarity that is at least 60%, 65%, 70%, 75%, 80%, 85%, 90%, 95%, 97%, 98%, 99%, or 100% over a region of 8, 9, 10, 11, 12, 13, 14, 15, 16, 17, 18, 19, 20, 21, 22, 23, 24, 25, 30, 35, 40, 45, 50, or more nucleotides, or refers to two nucleic acids that hybridize under stringent conditions. As used herein, “stringent conditions” for hybridization refer to conditions under which a nucleic acid having complementarity to a target sequence predominantly hybridizes with the target sequence, and substantially does not hybridize to non-target sequences. Stringent conditions are generally sequence-dependent, and vary depending on a number of factors. In general, the longer the sequence, the higher the temperature at which the sequence specifically hybridizes to its target sequence. Non-limiting examples of stringent conditions are described in detail in Tijssen (1993), Laboratory Techniques In Biochemistry And Molecular Biology-Hybridization With Nucleic Acid Probes Part I, Second Chapter “Overview of principles of hybridization and the strategy of nucleic acid probe assay”, Elsevier, N.Y. Where reference is made to a polynucleotide sequence, then complementary or partially complementary sequences are also envisaged. These are preferably capable of hybridizing to the reference sequence under highly stringent conditions. Generally, in order to maximize the hybridization rate, relatively low-stringency hybridization conditions are selected: about 20 to 25° C. lower than the thermal melting point (Tₘ). The Tₘ is the temperature at which 50% of specific target sequence hybridizes to a perfectly complementary probe in solution at a defined ionic strength and pH. Generally, in order to require at least about 85% nucleotide complementarity of hybridized sequences, highly stringent washing conditions are selected to be about 5 to 15° C. lower than the Tₘ. In order to require at least about 70% nucleotide complementarity of hybridized sequences, moderately-stringent washing conditions are selected to be about 15 to 30° C. lower than the T. Highly permissive (very low stringency) washing conditions may be as low as 50° C. below the Tₘ, allowing a high level of mis-matching between hybridized sequences. Those skilled in the art will recognize that other physical and chemical parameters in the hybridization and wash stages can also be altered to affect the outcome of a detectable hybridization signal from a specific level of homology between target and probe sequences. Preferred highly stringent conditions comprise incubation in 50% formamide, 5×SSC, and 1% SDS at 42° C., or incubation in 5×SSC and 1% SDS at 65° C., with wash in 0.2×SSC and 0.1% SDS at 65° C. “Hybridization” refers to a reaction in which one or more polynucleotides react to form a complex that is stabilized via hydrogen bonding between the bases of the nucleotide residues. The hydrogen bonding may occur by Watson Crick base pairing, Hoogstein binding, or in any other sequence specific manner. The complex may comprise two strands forming a duplex structure, three or more strands forming a multi stranded complex, a single self-hybridizing strand, or any combination of these. A hybridization reaction may constitute a step in a more extensive process, such as the initiation of PCR, or the cleavage of a polynucleotide by an enzyme. A sequence capable of hybridizing with a given sequence is referred to as the “complement” of the given sequence. As used herein, the term “genomic locus” or “locus” (plural loci) is the specific location of a gene or DNA sequence on a chromosome. A “gene” refers to stretches of DNA or RNA that encode a polypeptide or an RNA chain that has functional role to play in an organism and hence is the molecular unit of heredity in living organisms. For the purpose of this invention it may be considered that genes include regions which regulate the production of the gene product, whether or not such regulatory sequences are adjacent to coding and/or transcribed sequences. Accordingly, a gene includes, but is not necessarily limited to, promoter sequences, terminators, translational regulatory sequences such as ribosome binding sites and internal ribosome entry sites, enhancers, silencers, insulators, boundary elements, replication origins, matrix attachment sites and locus control regions. As used herein, “expression of a genomic locus” or “gene expression” is the process by which information from a gene is used in the synthesis of a functional gene product. The products of gene expression are often proteins, but in non-protein coding genes such as rRNA genes or tRNA genes, the product is functional RNA. The process of gene expression is used by all known life—eukaryotes (including multicellular organisms), prokaryotes (bacteria and archaea) and viruses to generate functional products to survive. As used herein “expression” of a gene or nucleic acid encompasses not only cellular gene expression, but also the transcription and translation of nucleic acid(s) in cloning systems and in any other context. As used herein, “expression” also refers to the process by which a polynucleotide is transcribed from a DNA template (such as into and mRNA or other RNA transcript) and/or the process by which a transcribed mRNA is subsequently translated into peptides, polypeptides, or proteins. Transcripts and encoded polypeptides may be collectively referred to as “gene product.” If the polynucleotide is derived from genomic DNA, expression may include splicing of the mRNA in a eukaryotic cell. The terms “polypeptide”, “peptide” and “protein” are used interchangeably herein to refer to polymers of amino acids of any length. The polymer may be linear or branched, it may comprise modified amino acids, and it may be interrupted by non-amino acids. The terms also encompass an amino acid polymer that has been modified; for example, disulfide bond formation, glycosylation, lipidation, acetylation, phosphorylation, or any other manipulation, such as conjugation with a labeling component. As used herein the term “amino acid” includes natural and/or unnatural or synthetic amino acids, including glycine and both the D or L optical isomers, and amino acid analogs and peptidomimetics. As used herein, the term “domain” or “protein domain” refers to a part of a protein sequence that may exist and function independently of the rest of the protein chain. As described in aspects of the invention, sequence identity is related to sequence homology. Homology comparisons may be conducted by eye, or more usually, with the aid of readily available sequence comparison programs. These commercially available computer programs may calculate percent (%) homology between two or more sequences and may also calculate the sequence identity shared by two or more amino acid or nucleic acid sequences.

[1097] As used herein the term “wild type” is a term of the art understood by skilled persons and means the typical form of an organism, strain, gene or characteristic as it occurs in nature as distinguished from mutant or variant forms. A “wild type” can be a base line.

[1098] As used herein the term “variant” should be taken to mean the exhibition of qualities that have a pattern that deviates from what occurs in nature. The terms “non-naturally occurring” or “engineered” are used interchangeably and indicate the involvement of the hand of man. The terms, when referring to nucleic acid molecules or polypeptides mean that the nucleic acid molecule or the polypeptide is at least substantially free from at least one other component with which they are naturally associated in nature and as found in nature. In all aspects and embodiments, whether they include these terms or not, it will be understood that, preferably, the may be optional and thus preferably included or not preferably not included. Furthermore, the terms “non-naturally occurring” and “engineered” may be used interchangeably and so can therefore be used alone or in combination and one or other may replace mention of both together. In particular, “engineered” is preferred in place of “non-naturally occurring” or “non-naturally occurring and/or engineered.”

[1099] Sequence homologies may be generated by any of a number of computer programs known in the art, for example BLAST or FASTA, etc. A suitable computer program for carrying out such an alignment is the GCG Wisconsin Bestfit package (University of Wisconsin, U.S.A; Devereux et al., 1984, Nucleic Acids Research 12:387). Examples of other software than may perform sequence comparisons include, but are not limited to, the BLAST package (see Ausubel et al., 1999 ibid—Chapter 18), FASTA (Atschul et al., 1990, J. Mol. Biol., 403-410) and the GENEWORKS suite of comparison tools. Both BLAST and FASTA are available for offline and online searching (see Ausubel et al., 1999 ibid, pages 7-58 to 7-60). However it is preferred to use the GCG Bestfit program. Percentage (%) sequence homology may be calculated over contiguous sequences, i.e., one sequence is aligned with the other sequence and each amino acid or nucleotide in one sequence is directly compared with the corresponding amino acid or nucleotide in the other sequence, one residue at a time. This is called an “ungapped” alignment. Typically, such ungapped alignments are performed only over a relatively short number of residues. Although this is a very simple and consistent method, it fails to take into consideration that, for example, in an otherwise identical pair of sequences, one insertion or deletion may cause the following amino acid residues to be put out of alignment, thus potentially resulting in a large reduction in % homology when a global alignment is performed. Consequently, most sequence comparison methods are designed to produce optimal alignments that take into consideration possible insertions and deletions without unduly penalizing the overall homology or identity score. This is achieved by inserting “gaps” in the sequence alignment to try to maximize local homology or identity. However, these more complex methods assign “gap penalties” to each gap that occurs in the alignment so that, for the same number of identical amino acids, a sequence alignment with as few gaps as possible—reflecting higher relatedness between the two compared sequences—may achieve a higher score than one with many gaps. “Affinity gap costs” are typically used that charge a relatively high cost for the existence of a gap and a smaller penalty for each subsequent residue in the gap. This is the most commonly used gap scoring system. High gap penalties may, of course, produce optimized alignments with fewer gaps. Most alignment programs allow the gap penalties to be modified. However, it is preferred to use the default values when using such software for sequence comparisons. For example, when using the GCG Wisconsin Bestfit package the default gap penalty for amino acid sequences is −12 for a gap and −4 for each extension. Calculation of maximum % homology therefore first requires the production of an optimal alignment, taking into consideration gap penalties. A suitable computer program for carrying out such an alignment is the GCG Wisconsin Bestfit package (Devereux et al., 1984 Nuc. Acids Research 12 p 387). Examples of other software than may perform sequence comparisons include, but are not limited to, the BLAST package (see Ausubel et al., 1999 Short Protocols in Molecular Biology, 4th Ed. —Chapter 18), FASTA (Altschul et al., 1990 J. Mol. Biol. 403-410) and the GENEWORKS suite of comparison tools. Both BLAST and FASTA are available for offline and online searching (see Ausubel et al., 1999, Short Protocols in Molecular Biology, pages 7-58 to 7-60). However, for some applications, it is preferred to use the GCG Bestfit program. A new tool, called BLAST 2 Sequences is also available for comparing protein and nucleotide sequences (see FEMS Microbiol Lett. 1999 174(2): 247-50; FEMS Microbiol Lett. 1999 177(1): 187-8 and the website of the National Center for Biotechnology information at the website of the National Institutes for Health). Although the final % homology may be measured in terms of identity, the alignment process itself is typically not based on an all-or-nothing pair comparison. Instead, a scaled similarity score matrix is generally used that assigns scores to each pair-wise comparison based on chemical similarity or evolutionary distance. An example of such a matrix commonly used is the BLOSUM62 matrix—the default matrix for the BLAST suite of programs. GCG Wisconsin programs generally use either the public default values or a custom symbol comparison table, if supplied (see user manual for further details). For some applications, it is preferred to use the public default values for the GCG package, or in the case of other software, the default matrix, such as BLOSUM62. Alternatively, percentage homologies may be calculated using the multiple alignment feature in DNASIS™ (Hitachi Software), based on an algorithm, analogous to CLUSTAL (Higgins D G & Sharp P M (1988), Gene 73(1), 237-244). Once the software has produced an optimal alignment, it is possible to calculate % homology, preferably % sequence identity. The software typically does this as part of the sequence comparison and generates a numerical result. The sequences may also have deletions, insertions or substitutions of amino acid residues which produce a silent change and result in a functionally equivalent substance. Deliberate amino acid substitutions may be made on the basis of similarity in amino acid properties (such as polarity, charge, solubility, hydrophobicity, hydrophilicity, and/or the amphipathic nature of the residues) and it is therefore useful to group amino acids together in functional groups. Amino acids may be grouped together based on the properties of their side chains alone. However, it is more useful to include mutation data as well. The sets of amino acids thus derived are likely to be conserved for structural reasons. These sets may be described in the form of a Venn diagram (Livingstone C.D. and Barton G. J. (1993) “Protein sequence alignments: a strategy for the hierarchical analysis of residue conservation” Comput. Appl. Biosci. 9: 745-756) (Taylor W.R. (1986) “The classification of amino acid conservation” J. Theor. Biol. 119; 205-218). Conservative may be made, for example according to Table 7 which describes a generally accepted Venn diagram grouping of amino acids.

[1100] The terms “subject,” “individual,” and “patient” are used interchangeably herein to refer to a vertebrate, preferably a mammal, more preferably a human. Mammals include, but are not limited to, murines, simians, humans, farm animals, sport animals, and pets. Tissues, cells and their progeny of a biological entity obtained in vivo or cultured in vitro are also encompassed.

[1101] The terms “therapeutic agent”, “therapeutic capable agent” or “treatment agent” are used interchangeably and refer to a molecule or compound that confers some beneficial effect upon administration to a subject. The beneficial effect includes enablement of diagnostic determinations; amelioration of a disease, symptom, disorder, or pathological condition; reducing or preventing the onset of a disease, symptom, disorder or condition; and generally counteracting a disease, symptom, disorder or pathological condition. As used herein, “treatment” or “treating,” or “palliating” or “ameliorating” are used interchangeably. These terms refer to an approach for obtaining beneficial or desired results including but not limited to a therapeutic benefit and/or a prophylactic benefit. By therapeutic benefit is meant any therapeutically relevant improvement in or effect on one or more diseases, conditions, or symptoms under treatment. For prophylactic benefit, the compositions may be administered to a subject at risk of developing a particular disease, condition, or symptom, or to a subject reporting one or more of the physiological symptoms of a disease, even though the disease, condition, or symptom may not have yet been manifested. The term “effective amount” or “therapeutically effective amount” refers to the amount of an agent that is sufficient to effect beneficial or desired results. The therapeutically effective amount may vary depending upon one or more of: the subject and disease condition being treated, the weight and age of the subject, the severity of the disease condition, the manner of administration and the like, which can readily be determined by one of ordinary skill in the art. The term also applies to a dose that will provide an image for detection by any one of the imaging methods described herein. The specific dose may vary depending on one or more of: the particular agent chosen, the dosing regimen to be followed, whether it is administered in combination with other compounds, timing of administration, the tissue to be imaged, and the physical delivery system in which it is carried.

[1102] The practice of the present invention employs, unless otherwise indicated, conventional techniques of immunology, biochemistry, chemistry, molecular biology, microbiology, cell biology, genomics and recombinant DNA, which are within the skill of the art. See Sambrook, Fritsch and Maniatis, MOLECULAR CLONING: A LABORATORY MANUAL, 2nd edition (1989); CURRENT PROTOCOLS IN MOLECULAR BIOLOGY (F. M. Ausubel, et al. eds., (1987)); the series METHODS IN ENZYMOLOGY (Academic Press, Inc.): PCR 2: A PRACTICAL APPROACH (M. J. MacPherson, B. D. Hames and G. R. Taylor eds. (1995)), Harlow and Lane, eds. (1988) ANTIBODIES, A LABORATORY MANUAL, and ANIMAL CELL CULTURE (R.I. Freshney, ed. (1987)). Several aspects of the invention relate to vector systems comprising one or more vectors, or vectors as such. Vectors can be designed for expression of CRISPR transcripts (e.g. nucleic acid transcripts, proteins, or enzymes) in prokaryotic or eukaryotic cells. For example, CRISPR transcripts can be expressed in bacterial cells such as Escherichia coli, insect cells (using baculovirus expression vectors), yeast cells, or mammalian cells. Suitable host cells are discussed further in Goeddel, GENE EXPRESSION TECHNOLOGY: METHODS IN ENZYMOLOGY 185, Academic Press, San Diego, Calif. (1990). Alternatively, the recombinant expression vector can be transcribed and translated in vitro, for example using T7 promoter regulatory sequences and T7 polymerase. Embodiments of the invention include sequences (both polynucleotide or polypeptide) which may comprise homologous substitution (substitution and replacement are both used herein to mean the interchange of an existing amino acid residue or nucleotide, with an alternative residue or nucleotide) that may occur i.e., like-for-like substitution in the case of amino acids such as basic for basic, acidic for acidic, polar for polar, etc. Non-homologous substitution may also occur i.e., from one class of residue to another or alternatively involving the inclusion of unnatural amino acids such as ornithine (hereinafter referred to as Z), diaminobutyric acid ornithine (hereinafter referred to as B), norleucine ornithine (hereinafter referred to as O), pyriylalanine, thienylalanine, naphthylalanine and phenylglycine. Variant amino acid sequences may include suitable spacer groups that may be inserted between any two amino acid residues of the sequence including alkyl groups such as methyl, ethyl or propyl groups in addition to amino acid spacers such as glycine or β-alanine residues. A further form of variation, which involves the presence of one or more amino acid residues in peptoid form, may be well understood by those skilled in the art. For the avoidance of doubt, “the peptoid form” is used to refer to variant amino acid residues wherein the α-carbon substituent group is on the residue's nitrogen atom rather than the α-carbon. Processes for preparing peptides in the peptoid form are known in the art, for example Simon R J et al., PNAS (1992) 89(20), 9367-9371 and Horwell D C, Trends Biotechnol. (1995) 13(4), 132-134. Homology modelling: Corresponding residues in other CRISPR-Cas orthologs can be identified by the methods of Zhang et al., 2012 (Nature; 490(7421): 556-60) and Chen et al., 2015 (PLoS Comput Biol; 11(5): e1004248)—a computational protein-protein interaction (PPI) method to predict interactions mediated by domain-motif interfaces. PrePPI (Predicting PPI), a structure based PPI prediction method, combines structural evidence with non-structural evidence using a Bayesian statistical framework. The method involves taking a pair a query proteins and using structural alignment to identify structural representatives that correspond to either their experimentally determined structures or homology models. Structural alignment is further used to identify both close and remote structural neighbors by considering global and local geometric relationships. Whenever two neighbors of the structural representatives form a complex reported in the Protein Data Bank, this defines a template for modelling the interaction between the two query proteins. Models of the complex are created by superimposing the representative structures on their corresponding structural neighbor in the template. This approach is further described in Dey et al., 2013 (Prot Sci; 22: 359-66).

[1103] For purpose of this invention, amplification means any method employing a primer and a polymerase capable of replicating a target sequence with reasonable fidelity. Amplification may be carried out by natural or recombinant DNA polymerases such as TaqGold™, T7 DNA polymerase, Klenow fragment of E. coli DNA polymerase, and reverse transcriptase. A preferred amplification method is PCR. In certain aspects the invention involves vectors. A used herein, a “vector” is a tool that allows or facilitates the transfer of an entity from one environment to another. It is a replicon, such as a plasmid, phage, or cosmid, into which another DNA segment may be inserted so as to bring about the replication of the inserted segment. Generally, a vector is capable of replication when associated with the proper control elements. In general, the term “vector” refers to a nucleic acid molecule capable of transporting another nucleic acid to which it has been linked. Vectors include, but are not limited to, nucleic acid molecules that are single-stranded, double-stranded, or partially double-stranded; nucleic acid molecules that comprise one or more free ends, no free ends (e.g., circular); nucleic acid molecules that comprise DNA, RNA, or both; and other varieties of polynucleotides known in the art. One type of vector is a “plasmid,” which refers to a circular double stranded DNA loop into which additional DNA segments can be inserted, such as by standard molecular cloning techniques. Another type of vector is a viral vector, wherein virally-derived DNA or RNA sequences are present in the vector for packaging into a virus (e.g., retroviruses, replication defective retroviruses, adenoviruses, replication defective adenoviruses, and adeno-associated viruses (AAVs)). Viral vectors also include polynucleotides carried by a virus for transfection into a host cell. Certain vectors are capable of autonomous replication in a host cell into which they are introduced (e.g., bacterial vectors having a bacterial origin of replication and episomal mammalian vectors). Other vectors (e.g., non-episomal mammalian vectors) are integrated into the genome of a host cell upon introduction into the host cell, and thereby are replicated along with the host genome. Moreover, certain vectors are capable of directing the expression of genes to which they are operatively-linked. Such vectors are referred to herein as “expression vectors.” Common expression vectors of utility in recombinant DNA techniques are often in the form of plasmids. Recombinant expression vectors can comprise a nucleic acid of the invention in a form suitable for expression of the nucleic acid in a host cell, which means that the recombinant expression vectors include one or more regulatory elements, which may be selected on the basis of the host cells to be used for expression, that is operatively-linked to the nucleic acid sequence to be expressed. Within a recombinant expression vector, “operably linked” is intended to mean that the nucleotide sequence of interest is linked to the regulatory element(s) in a manner that allows for expression of the nucleotide sequence (e.g., in an in vitro transcription/translation system or in a host cell when the vector is introduced into the host cell). With regards to recombination and cloning methods, mention is made of U.S. patent application Ser. No. 10/815,730, published Sep. 2, 2004 as US 2004-0171156 A1, the contents of which are herein incorporated by reference in their entirety. Aspects of the invention relate to bicistronic vectors for guide RNA and wild type, modified or mutated CRISPR effector proteins/enzymes (e.g. Cas13 effector proteins). Bicistronic expression vectors guide RNA and wild type, modified or mutated CRISPR effector proteins/enzymes (e.g. Cas13 effector proteins) are preferred. In general and particularly in this embodiment and wild type, modified or mutated CRISPR effector proteins/enzymes (e.g. Cas13 effector proteins) is preferably driven by the CBh promoter. The RNA may preferably be driven by a Pol III promoter, such as a U6 promoter. Ideally the two are combined.

[1104] In some embodiments, a loop in the guide RNA or crRNA is provided. This may be a stem loop or a tetra loop. The loop is preferably GAAA, but it is not limited to this sequence or indeed to being only 4 bp in length. Indeed, preferred loop forming sequences for use in hairpin structures are four nucleotides in length, and most preferably have the sequence GAAA. However, longer or shorter loop sequences may be used, as may alternative sequences. The sequences preferably include a nucleotide triplet (for example, AAA), and an additional nucleotide (for example C or G). Examples of loop forming sequences include CAAA and AAAG.

[1105] In practicing any of the methods disclosed herein, a suitable vector can be introduced to a cell or an embryo via one or more methods known in the art, including without limitation, microinjection, electroporation, sonoporation, biolistics, calcium phosphate-mediated transfection, cationic transfection, liposome transfection, dendrimer transfection, heat shock transfection, nucleofection transfection, magnetofection, lipofection, impalefection, optical transfection, proprietary agent-enhanced uptake of nucleic acids, and delivery via liposomes, immunoliposomes, virosomes, or artificial virions. In some methods, the vector is introduced into an embryo by microinjection. The vector or vectors may be microinjected into the nucleus or the cytoplasm of the embryo. In some methods, the vector or vectors may be introduced into a cell by nucleofection.

[1106] Vectors can be designed for expression of CRISPR transcripts (e.g., nucleic acid transcripts, proteins, or enzymes) in prokaryotic or eukaryotic cells. For example, CRISPR transcripts can be expressed in bacterial cells such as Escherichia coli, insect cells (using baculovirus expression vectors), yeast cells, or mammalian cells. Suitable host cells are discussed further in Goeddel, GENE EXPRESSION TECHNOLOGY: METHODS IN ENZYMOLOGY 185, Academic Press, San Diego, Calif. (1990). Alternatively, the recombinant expression vector can be transcribed and translated in vitro, for example using T7 promoter regulatory sequences and T7 polymerase.

[1107] Vectors may be introduced and propagated in a prokaryote or prokaryotic cell. In some embodiments, a prokaryote is used to amplify copies of a vector to be introduced into a eukaryotic cell or as an intermediate vector in the production of a vector to be introduced into a eukaryotic cell (e.g., amplifying a plasmid as part of a viral vector packaging system). In some embodiments, a prokaryote is used to amplify copies of a vector and express one or more nucleic acids, such as to provide a source of one or more proteins for delivery to a host cell or host organism. Expression of proteins in prokaryotes is most often carried out in Escherichia coli with vectors containing constitutive or inducible promoters directing the expression of either fusion or non-fusion proteins. Fusion vectors add a number of amino acids to a protein encoded therein, such as to the amino terminus of the recombinant protein. Such fusion vectors may serve one or more purposes, such as: (i) to increase expression of recombinant protein; (ii) to increase the solubility of the recombinant protein; and (iii) to aid in the purification of the recombinant protein by acting as a ligand in affinity purification. Often, in fusion expression vectors, a proteolytic cleavage site is introduced at the junction of the fusion moiety and the recombinant protein to enable separation of the recombinant protein from the fusion moiety subsequent to purification of the fusion protein. Such enzymes, and their cognate recognition sequences, include Factor Xa, thrombin and enterokinase. Example fusion expression vectors include pGEX (Pharmacia Biotech Inc; Smith and Johnson, 1988. Gene 67: 31-40), pMAL (New England Biolabs, Beverly, Mass.) and pRIT5 (Pharmacia, Piscataway, N.J.) that fuse glutathione S-transferase (GST), maltose E binding protein, or protein A, respectively, to the target recombinant protein. Examples of suitable inducible non-fusion E. coli expression vectors include pTrc (Amrann et al., (1988) Gene 69:301-315) and pET 11d (Studier et al., GENE EXPRESSION TECHNOLOGY: METHODS IN ENZYMOLOGY 185, Academic Press, San Diego, Calif. (1990) 60-89). In some embodiments, a vector is a yeast expression vector. Examples of vectors for expression in yeast Saccharomyces cerevisiae include pYepSec1 (Baldari, et al., 1987. EMBO J. 6: 229-234), pMFa (Kuijan and Herskowitz, 1982. Cell 30: 933-943), pJRY88 (Schultz et al., 1987. Gene 54: 113-123), pYES2 (Invitrogen Corporation, San Diego, Calif.), and picZ (InVitrogen Corp, San Diego, Calif). In some embodiments, a vector drives protein expression in insect cells using baculovirus expression vectors. Baculovirus vectors available for expression of proteins in cultured insect cells (e.g., SF9 cells) include the pAc series (Smith, et al., 1983. Mol. Cell. Biol. 3: 2156-2165) and the pVL series (Lucklow and Summers, 1989. Virology 170: 31-39). In some embodiments, a vector is capable of driving expression of one or more sequences in mammalian cells using a mammalian expression vector. Examples of mammalian expression vectors include pCDM8 (Seed, 1987. Nature 329: 840) and pMT2PC (Kaufman, et al., 1987. EMBO J. 6: 187-195). When used in mammalian cells, the expression vector's control functions are typically provided by one or more regulatory elements. For example, commonly used promoters are derived from polyoma, adenovirus 2, cytomegalovirus, simian virus 40, and others disclosed herein and known in the art. For other suitable expression systems for both prokaryotic and eukaryotic cells see, e.g., Chapters 16 and 17 of Sambrook, et al., MOLECULAR CLONING: A LABORATORY MANUAL. 2nd ed., Cold Spring Harbor Laboratory, Cold Spring Harbor Laboratory Press, Cold Spring Harbor, N.Y., 1989. In some embodiments, the recombinant mammalian expression vector is capable of directing expression of the nucleic acid preferentially in a particular cell type (e.g., tissue-specific regulatory elements are used to express the nucleic acid). Tissue-specific regulatory elements are known in the art. Non-limiting examples of suitable tissue-specific promoters include the albumin promoter (liver-specific; Pinkert, et al., 1987. Genes Dev. 1: 268-277), lymphoid-specific promoters (Calame and Eaton, 1988. Adv. Immunol. 43: 235-275), in particular promoters of T cell receptors (Winoto and Baltimore, 1989. EMBO J. 8: 729-733) and immunoglobulins (Baneiji, et al., 1983. Cell 33: 729-740; Queen and Baltimore, 1983. Cell 33: 741-748), neuron-specific promoters (e.g., the neurofilament promoter; Byrne and Ruddle, 1989. Proc. Natl. Acad. Sci. USA 86: 5473-5477), pancreas-specific promoters (Edlund, et al., 1985. Science 230: 912-916), and mammary gland-specific promoters (e.g., milk whey promoter; U.S. Pat. No. 4,873,316 and European Application Publication No. 264,166). Developmentally-regulated promoters are also encompassed, e.g., the murine hox promoters (Kessel and Gruss, 1990. Science 249: 374-379) and the α-fetoprotein promoter (Campes and Tilghman, 1989. Genes Dev. 3: 537-546). With regards to these prokaryotic and eukaryotic vectors, mention is made of U.S. Pat. No. 6,750,059, the contents of which are incorporated by reference herein in their entirety. Other embodiments of the invention may relate to the use of viral vectors, with regards to which mention is made of U.S. patent application Ser. No. 13/092,085, the contents of which are incorporated by reference herein in their entirety. Tissue-specific regulatory elements are known in the art and in this regard, mention is made of U.S. Pat. No. 7,776,321, the contents of which are incorporated by reference herein in their entirety.

[1108] In some embodiments, a regulatory element is operably linked to one or more elements of or encoding a CRISPR Cas system or complex so as to drive expression of the one or more elements of the CRISPR system. In general, CRISPRs (Clustered Regularly Interspaced Short Palindromic Repeats), also known as SPIDRs (SPacer Interspersed Direct Repeats), constitute a family of DNA loci that are usually specific to a particular bacterial species. The CRISPR locus comprises a distinct class of interspersed short sequence repeats (SSRs) that were recognized in E. coli (Ishino et al., J. Bacteriol., 169:5429-5433 [1987]; and Nakata et al., J. Bacteriol., 171:3553-3556 [1989]), and associated genes. Similar interspersed SSRs have been identified in Haloferax mediterranei, Streptococcus pyogenes, Anabaena, and Mycobacterium tuberculosis (See, Groenen et al., Mol. Microbiol., 10:1057-1065 [1993]; Hoe et al., Emerg. Infect. Dis., 5:254-263 [1999]; Masepohl et al., Biochim. Biophys. Acta 1307:26-30 [1996]; and Mojica et al., Mol. Microbiol., 17:85-93 [1995]). The CRISPR loci typically differ from other SSRs by the structure of the repeats, which have been termed short regularly spaced repeats (SRSRs) (Janssen et al., OMICS J. Integ. Biol., 6:23-33 [2002]; and Mojica et al., Mol. Microbiol., 36:244-246 [2000]). In general, the repeats are short elements that occur in clusters that are regularly spaced by unique intervening sequences with a substantially constant length (Mojica et al., [2000], supra). Although the repeat sequences are highly conserved between strains, the number of interspersed repeats and the sequences of the spacer regions typically differ from strain to strain (van Embden et al., J. Bacteriol., 182:2393-2401 [2000]). CRISPR loci have been identified in more than 40 prokaryotes (See e.g., Jansen et al., Mol. Microbiol., 43:1565-1575 [2002]; and Mojica et al., [2005]) including, but not limited to Aeropyrum, Pyrobaculum, Sulfolobus, Archaeoglobus, Halocarcula, Methanobacterium, Methanococcus, Methanosarcina, Methanopyrus, Pyrococcus, Picrophilus, Thermoplasma, Corynebacterium, Mycobacterium, Streptomyces, Aquifex, Porphyromonas, Chlorobium, Thermus, Bacillus, Listeria, Staphylococcus, Clostridium, Thermoanaerobacter, Mycoplasma, Fusobacterium, Azarcus, Chromobacterium, Neisseria, Nitrosomonas, Desulfovibrio, Geobacter, Myxococcus, Campylobacter, Wolinella, Acinetobacter, Erwinia, Escherichia, Legionella, Methylococcus, Pasteurella, Photobacterium, Salmonella, Xanthomonas, Yersinia, Treponema, and Thermotoga.

[1109] In general, “RNA-targeting system” as used in the present application refers collectively to transcripts and other elements involved in the expression of or directing the activity of RNA-targeting CRISPR-associated 13 (“Cas13”) genes (also referred to herein as an effector protein), including sequences encoding a RNA-targeting Cas (effector) protein and a guide RNA (or crRNA sequence), with reference to the mutated CRISPR-Cas as herein discussed. In general, a RNA-targeting system is characterized by elements that promote the formation of a RNA-targeting complex at the site of a target sequence. In the context of formation of a RNA-targeting complex, “target sequence” refers to a RNA sequence to which a guide sequence (or the guide or of the crRNA) is designed to have complementarity, where hybridization between a target sequence and a guide RNA promotes the formation of a RNA-targeting complex. Full complementarity is not necessarily required, provided there is sufficient complementarity to cause hybridization and promote formation of a RNA-targeting complex. In some embodiments, a target sequence is located in the nucleus or cytoplasm of a cell. In some embodiments, the target sequence may be within an organelle of a eukaryotic cell. A sequence or template that may be used for recombination into the targeted locus comprising the target sequences is referred to as an “editing template” or “editing RNA” or “editing sequence”. In aspects of the invention, an exogenous template RNA may be referred to as an editing template. In an aspect of the invention the recombination is homologous recombination. In general, a guide sequence is any polynucleotide sequence having sufficient complementarity with a target polynucleotide sequence to hybridize with the target sequence and direct sequence-specific binding of a nucleic acid-targeting complex to the target sequence. In some embodiments, the degree of complementarity between a guide sequence and its corresponding target sequence, when optimally aligned using a suitable alignment algorithm, is about or more than about 50%, 60%, 75%, 80%, 85%, 90%, 95%, 97.5%, 99%, or more. Optimal alignment may be determined with the use of any suitable algorithm for aligning sequences, non-limiting example of which include the Smith-Waterman algorithm, the Needleman-Wunsch algorithm, algorithms based on the Burrows-Wheeler Transform (e.g. the Burrows Wheeler Aligner), ClustalW, Clustal X, BLAT, Novoalign (Novocraft Technologies, ELAND (Illumina, San Diego, Calif.), SOAP (available at soap.genomics.org.cn), and Maq (available at maq.sourceforge.net). In some embodiments, a guide sequence is about or more than about 5, 10, 11, 12, 13, 14, 15, 16, 17, 18, 19, 20, 21, 22, 23, 24, 25, 26, 27, 28, 29, 30, 35, 40, 45, 50, 75, or more nucleotides in length. In some embodiments, a guide sequence is less than about 75, 50, 45, 40, 35, 30, 25, 20, 15, 12, or fewer nucleotides in length. The ability of a guide sequence to direct sequence-specific binding of a RNA-targeting complex to a target sequence may be assessed by any suitable assay. A template polynucleotide may be of any suitable length, such as about or more than about 10, 15, 20, 25, 50, 75, 100, 150, 200, 500, 1000, or more nucleotides in length. In some embodiments, the template polynucleotide is complementary to a portion of a polynucleotide comprising the target sequence. When optimally aligned, a template polynucleotide might overlap with one or more nucleotides of a target sequences (e.g. about or more than about 1, 5, 10, 15, 20, 25, 30, 35, 40, 45, 50, 60, 70, 80, 90, 100 or more nucleotides). In some embodiments, when a template sequence and a polynucleotide comprising a target sequence are optimally aligned, the nearest nucleotide of the template polynucleotide is within about 1, 5, 10, 15, 20, 25, 50, 75, 100, 200, 300, 400, 500, 1000, 5000, 10000, or more nucleotides from the target sequence. In some embodiments, the RNA-targeting effector protein is part of a fusion protein comprising one or more heterologous protein domains (e.g., about or more than about 1, 2, 3, 4, 5, 6, 7, 8, 9, 10, or more domains in addition to the nucleic acid-targeting effector protein). In some embodiments, the CRISPR Cas effector protein/enzyme is part of a fusion protein comprising one or more heterologous protein domains (e.g. about or more than about 1, 2, 3, 4, 5, 6, 7, 8, 9, 10, or more domains in addition to the CRISPR Cas enzyme). Examples of protein domains that may be fused to an effector protein include, without limitation, epitope tags, reporter gene sequences, and protein domains having one or more of the following activities: methylase activity, demethylase activity, transcription activation activity, transcription repression activity, transcription release factor activity, histone modification activity, RNA cleavage activity and nucleic acid binding activity. Non-limiting examples of epitope tags include histidine (His) tags, V5 tags, FLAG tags, influenza hemagglutinin (HA) tags, Myc tags, VSV-G tags, and thioredoxin (Trx) tags. Examples of reporter genes include, but are not limited to, glutathione-S-transferase (GST), horseradish peroxidase (HRP), chloramphenicol acetyltransferase (CAT) beta-galactosidase, beta-glucuronidase, luciferase, green fluorescent protein (GFP), HcRed, DsRed, cyan fluorescent protein (CFP), yellow fluorescent protein (YFP), and autofluorescent proteins including blue fluorescent protein (BFP). A nucleic acid-targeting effector protein may be fused to a gene sequence encoding a protein or a fragment of a protein that bind DNA molecules or bind other cellular molecules, including but not limited to maltose binding protein (MBP), S-tag, Lex A DNA binding domain (DBD) fusions, GAL4 DNA binding domain fusions, and herpes simplex virus (HSV) BP16 protein fusions. Additional domains that may form part of a fusion protein comprising a nucleic acid-targeting effector protein are described in US20110059502, incorporated herein by reference. In some embodiments, a tagged nucleic acid-targeting effector protein is used to identify the location of a target sequence. In some embodiments, a CRISPR Cas enzyme may form a component of an inducible system. The inducible nature of the system would allow for spatiotemporal control of gene editing or gene expression using a form of energy. The form of energy may include but is not limited to electromagnetic radiation, sound energy, chemical energy and thermal energy. Examples of inducible system include tetracycline inducible promoters (Tet-On or Tet-Off), small molecule two-hybrid transcription activations systems (FKBP, ABA, etc), or light inducible systems (Phytochrome, LOV domains, or cryptochrome). In one embodiment, the CRISPR CRISPR-Cas enzyme may be a part of a Light Inducible Transcriptional Effector (LITE) to direct changes in transcriptional activity in a sequence-specific manner. The components of a light may include a CRISPR enzyme, a light-responsive cytochrome heterodimer (e.g. from Arabidopsis thaliana), and a transcriptional activation/repression domain. Further examples of inducible DNA binding proteins and methods for their use are provided in U.S. 61/736,465 and U.S. 61/721,283 and WO 2014/018423 and U.S. Pat. Nos. 8,889,418, 8,895,308, US20140186919, US20140242700, US20140273234, US20140335620, WO2014093635, which is hereby incorporated by reference in its entirety. In some aspects, the invention provides methods comprising delivering one or more polynucleotides, such as or one or more vectors as described herein, one or more transcripts thereof, and/or one or proteins transcribed therefrom, to a host cell. In some aspects, the invention further provides cells produced by such methods, and organisms (such as animals, plants, or fungi) comprising or produced from such cells. In some embodiments, a RNA-targeting effector protein in combination with (and optionally complexed with) a guide RNA or crRNA is delivered to a cell. Conventional viral and non-viral based gene transfer methods can be used to introduce nucleic acids in mammalian cells or target tissues. Such methods can be used to administer nucleic acids encoding components of a RNA-targeting system to cells in culture, or in a host organism. Non-viral vector delivery systems include DNA plasmids, RNA (e.g. a transcript of a vector described herein), naked nucleic acid, and nucleic acid complexed with a delivery vehicle, such as a liposome. Viral vector delivery systems include DNA and RNA viruses, which have either episomal or integrated genomes after delivery to the cell. For a review of gene therapy procedures, see Anderson, Science 256:808-813 (1992); Nabel & Felgner, TIBTECH 11:211-217 (1993); Mitani & Caskey, TIBTECH 11:162-166 (1993); Dillon, TIBTECH 11:167-175 (1993); Miller, Nature 357:455-460 (1992); Van Brunt, Biotechnology 6(10):1149-1154 (1988); Vigne, Restorative Neurology and Neuroscience 8:35-36 (1995); Kremer & Perricaudet, British Medical Bulletin 51(1):31-44 (1995); Haddada et al., in Current Topics in Microbiology and Immunology, Doerfler and Bohm (eds) (1995); and Yu et al., Gene Therapy 1:13-26 (1994). Methods of non-viral delivery of nucleic acids include lipofection, nucleofection, microinjection, biolistics, virosomes, liposomes, immunoliposomes, polycation or lipid:nucleic acid conjugates, naked DNA, artificial virions, and agent-enhanced uptake of DNA. Lipofection is described in e.g., U.S. Pat. Nos. 5,049,386, 4,946,787; and 4,897,355) and lipofection reagents are sold commercially (e.g., Transfectam™ and Lipofectin™) Cationic and neutral lipids that are suitable for efficient receptor-recognition lipofection of polynucleotides include those of Felgner, WO 91/17424; WO 91/16024. Delivery can be to cells (e.g. in vitro or ex vivo administration) or target tissues (e.g. in vivo administration).

[1110] The nucleic acids-targeting systems, the vector systems, the vectors and the compositions described herein may be used in various nucleic acids-targeting applications, altering or modifying synthesis of a gene product, such as a protein, nucleic acids cleavage, nucleic acids editing, nucleic acids splicing; trafficking of target nucleic acids, tracing of target nucleic acids, isolation of target nucleic acids, visualization of target nucleic acids, etc.

### Exemplary Delivery Methods

[1111] Through this disclosure and the knowledge in the art, TALEs, CRISPR-Cas systems, or components thereof or nucleic acid molecules thereof (including, for instance HDR template) or nucleic acid molecules encoding or providing components thereof may be delivered by a delivery system herein described both generally and in detail.

[1112] Vector delivery, e.g., plasmid, viral delivery: The CRISPR enzyme, and/or any of the present RNAs, for instance a guide RNA, can be delivered using any suitable vector, e.g., plasmid or viral vectors, such as adeno associated virus (AAV), lentivirus, adenovirus or other viral vector types, or combinations thereof. Effector proteins and one or more guide RNAs can be packaged into one or more vectors, e.g., plasmid or viral vectors. In some embodiments, the vector, e.g., plasmid or viral vector is delivered to the tissue of interest by, for example, an intramuscular injection, while other times the delivery is via intravenous, transdermal, intranasal, oral, mucosal, or other delivery methods. Such delivery may be either via a single dose, or multiple doses. One skilled in the art understands that the actual dosage to be delivered herein may vary greatly depending upon a variety of factors, such as the vector choice, the target cell, organism, or tissue, the general condition of the subject to be treated, the degree of transformation/modification sought, the administration route, the administration mode, the type of transformation/modification sought, etc.

[1113] Such a dosage may further contain, for example, a carrier (water, saline, ethanol, glycerol, lactose, sucrose, calcium phosphate, gelatin, dextran, agar, pectin, peanut oil, sesame oil, etc.), a diluent, a pharmaceutically-acceptable carrier (e.g., phosphate-buffered saline), a pharmaceutically-acceptable excipient, and/or other compounds known in the art. The dosage may further contain one or more pharmaceutically acceptable salts such as, for example, a mineral acid salt such as a hydrochloride, a hydrobromide, a phosphate, a sulfate, etc.; and the salts of organic acids such as acetates, propionates, malonates, benzoates, etc. Additionally, auxiliary substances, such as wetting or emulsifying agents, pH buffering substances, gels or gelling materials, flavorings, colorants, microspheres, polymers, suspension agents, etc. may also be present herein. In addition, one or more other conventional pharmaceutical ingredients, such as preservatives, humectants, suspending agents, surfactants, antioxidants, anticaking agents, fillers, chelating agents, coating agents, chemical stabilizers, etc. may also be present, especially if the dosage form is a reconstitutable form. Suitable exemplary ingredients include microcrystalline cellulose, carboxymethylcellulose sodium, polysorbate 80, phenylethyl alcohol, chlorobutanol, potassium sorbate, sorbic acid, sulfur dioxide, propyl gallate, the parabens, ethyl vanillin, glycerin, phenol, parachlorophenol, gelatin, albumin and a combination thereof. A thorough discussion of pharmaceutically acceptable excipients is available in REMINGTON'S PHARMACEUTICAL SCIENCES (Mack Pub. Co., N.J. 1991) which is incorporated by reference herein.

[1114] In an embodiment herein the delivery is via an adenovirus, which may be at a single booster dose containing at least 1×10⁵ particles (also referred to as particle units, pu) of adenoviral vector. In an embodiment herein, the dose preferably is at least about 1×10⁶ particles (for example, about 1×10⁶-1×10¹² particles), more preferably at least about 1×10⁷ particles, more preferably at least about 1×10⁸ particles (e.g., about 1×10⁸-1×10¹¹ particles or about 1×10⁸-1×10¹² particles), and most preferably at least about 1×10⁰ particles (e.g., about 1×10⁹-1×10¹⁰ particles or about 1×10⁹-1×10¹² particles), or even at least about 1×10¹⁰ particles (e.g., about 1×10¹⁰-1×10¹² particles) of the adenoviral vector. Alternatively, the dose comprises no more than about 1×10¹⁴ particles, preferably no more than about 1×10¹³ particles, even more preferably no more than about 1×10¹² particles, even more preferably no more than about 1×10¹¹ particles, and most preferably no more than about 1×10¹⁰ particles (e.g., no more than about 1×10⁹ articles). Thus, the dose may contain a single dose of adenoviral vector with, for example, about 1×10⁶ particle units (pu), about 2×10⁶ pu, about 4×10⁶ pu, about 1×10⁷ pu, about 2×10⁷ pu, about 4×10⁷ pu, about 1×10⁸ pu, about 2×10⁸ pu, about 4×10⁸ pu, about 1×10⁹ pu, about 2×10⁹ pu, about 4×10⁹ pu, about 1×10¹⁰ pu, about 2×10¹⁰ pu, about 4×10¹⁰ pu, about 1×10¹¹ pu, about 2×10¹¹ pu, about 4×10¹¹ pu, about 1×10¹² pu, about 2×10¹² pu, or about 4×10¹² pu of adenoviral vector. See, for example, the adenoviral vectors in U.S. Pat. No. 8,454,972 B2 to Nabel, et. al., granted on Jun. 4, 2013; incorporated by reference herein, and the dosages at col 29, lines 36-58 thereof. In an embodiment herein, the adenovirus is delivered via multiple doses.

[1115] In an embodiment herein, the delivery is via an AAV. A therapeutically effective dosage for in vivo delivery of the AAV to a human is believed to be in the range of from about 20 to about 50 ml of saline solution containing from about 1×10¹⁰ to about 1×10¹⁰ functional AAV/ml solution. The dosage may be adjusted to balance the therapeutic benefit against any side effects. In an embodiment herein, the AAV dose is generally in the range of concentrations of from about 1×10⁵ to 1×10⁵⁰ genomes AAV, from about 1×10⁸ to 1×10²⁰ genomes AAV, from about 1×10¹⁰ to about 1×10¹⁶ genomes, or about 1×10¹¹ to about 1×10¹⁶ genomes AAV. A human dosage may be about 1×10¹³ genomes AAV. Such concentrations may be delivered in from about 0.001 ml to about 100 ml, about 0.05 to about 50 ml, or about 10 to about 25 ml of a carrier solution. Other effective dosages can be readily established by one of ordinary skill in the art through routine trials establishing dose response curves. See, for example, U.S. Pat. No. 8,404,658 B2 to Hajjar, et al., granted on Mar. 26, 2013, at col. 27, lines 45-60.

[1116] In an embodiment herein the delivery is via a plasmid. In such plasmid compositions, the dosage should be a sufficient amount of plasmid to elicit a response. For instance, suitable quantities of plasmid DNA in plasmid compositions can be from about 0.1 to about 2 mg, or from about 1 μg to about 10 μg per 70 kg individual. Plasmids of the invention will generally comprise (i) a promoter; (ii) a sequence encoding an nucleic acid-targeting CRISPR enzyme, operably linked to said promoter; (iii) a selectable marker; (iv) an origin of replication; and (v) a transcription terminator downstream of and operably linked to (ii). The plasmid can also encode the RNA components of a CRISPR complex, but one or more of these may instead be encoded on a different vector.

[1117] The doses herein are based on an average 70 kg individual. The frequency of administration is within the ambit of the medical or veterinary practitioner (e.g., physician, veterinarian), or scientist skilled in the art. It is also noted that mice used in experiments are typically about 20 g and from mice experiments one can scale up to a 70 kg individual.

[1118] In some embodiments the RNA molecules of the invention are delivered in liposome or lipofectin formulations and the like and can be prepared by methods well known to those skilled in the art. Such methods are described, for example, in U.S. Pat. Nos. 5,593,972, 5,589,466, and 5,580,859, which are herein incorporated by reference. Delivery systems aimed specifically at the enhanced and improved delivery of siRNA into mammalian cells have been developed, (see, for example, Shen et al FEBS Let. 2003, 539:111-114; Xia et al., Nat. Biotech. 2002, 20:1006-1010; Reich et al., Mol. Vision. 2003, 9: 210-216; Sorensen et al., J. Mol. Biol. 2003, 327: 761-766; Lewis et al., Nat. Gen. 2002, 32: 107-108 and Simeoni et al., NAR 2003, 31, 11: 2717-2724) and may be applied to the present invention. siRNA has recently been successfully used for inhibition of gene expression in primates (see for example. Tolentino et al., Retina 24(4):660 which may also be applied to the present invention.

[1119] Indeed, RNA delivery is a useful method of in vivo delivery. It is possible to deliver nucleic acid-targeting Cas protein and guide RNA (and, for instance, HR repair template) into cells using liposomes or particles. Thus delivery of the nucleic acid-targeting CRISPR-Cas protein and/or delivery of the guide RNAs or crRNAs of the invention may be in RNA form and via microvesicles, liposomes or particles. For example, CRISPR-Cas mRNA and guide RNA or crRNA can be packaged into liposomal particles for delivery in vivo. Liposomal transfection reagents such as lipofectamine from Life Technologies and other reagents on the market can effectively deliver RNA molecules into the liver.

[1120] Means of delivery of RNA also preferred include delivery of RNA via nanoparticles (Cho, S., Goldberg, M., Son, S., Xu, Q., Yang, F., Mei, Y., Bogatyrev, S., Langer, R. and Anderson, D., Lipid-like nanoparticles for small interfering RNA delivery to endothelial cells, Advanced Functional Materials, 19: 3112-3118, 2010) or exosomes (Schroeder, A., Levins, C., Cortez, C., Langer, R., and Anderson, D., Lipid-based nanotherapeutics for siRNA delivery, Journal of Internal Medicine, 267: 9-21, 2010, PMID: 20059641). Indeed, exosomes have been shown to be particularly useful in delivery siRNA, a system with some parallels to the RNA-targeting system. For instance, El-Andaloussi S, et al. (“Exosome-mediated delivery of siRNA in vitro and in vivo.” Nat Protoc. 2012 December; 7(12):2112-26. doi: 10.1038/nprot.2012.131. Epub 2012 Nov. 15.) describe how exosomes are promising tools for drug delivery across different biological barriers and can be harnessed for delivery of siRNA in vitro and in vivo. Their approach is to generate targeted exosomes through transfection of an expression vector, comprising an exosomal protein fused with a peptide ligand. The exosomes are then purify and characterized from transfected cell supernatant, then RNA is loaded into the exosomes. Delivery or administration according to the invention can be performed with exosomes, in particular but not limited to the brain. Vitamin E (α-tocopherol) may be conjugated with nucleic acid-targeting Cas protein and delivered to the brain along with high density lipoprotein (HDL), for example in a similar manner as was done by Uno et al. (HUMAN GENE THERAPY 22:711-719 (June 2011)) for delivering short-interfering RNA (siRNA) to the brain. Mice were infused via Osmotic minipumps (model 1007D; Alzet, Cupertino, Calif.) filled with phosphate-buffered saline (PBS) or free TocsiBACE or Toc-siBACE/HDL and connected with Brain Infusion Kit 3 (Alzet). A brain-infusion cannula was placed about 0.5 mm posterior to the bregma at midline for infusion into the dorsal third ventricle. Uno et al. found that as little as 3 nmol of Toc-siRNA with HDL could induce a target reduction in comparable degree by the same ICV infusion method. A similar dosage of nucleic acid-targeting effector protein conjugated to α-tocopherol and co-administered with HDL targeted to the brain may be contemplated for humans in the present invention, for example, about 3 nmol to about 3 μmol of nucleic acid-targeting effector protein targeted to the brain may be contemplated. Zou et al. ((HUMAN GENE THERAPY 22:465-475 (April 2011)) describes a method of lentiviral-mediated delivery of short-hairpin RNAs targeting PKCγ for in vivo gene silencing in the spinal cord of rats. Zou et al. administered about 10 μl of a recombinant lentivirus having a titer of 1×10⁹ transducing units (TU)/ml by an intrathecal catheter. A similar dosage of nucleic acid-targeting effector protein expressed in a lentiviral vector targeted to the brain may be contemplated for humans in the present invention, for example, about 10-50 ml of nucleic acid-targeting effector protein targeted to the brain in a lentivirus having a titer of 1×10⁹ transducing units (TU)/ml may be contemplated.

[1121] In terms of local delivery to the brain, this can be achieved in various ways. For instance, material can be delivered intrastriatally e.g., by injection. Injection can be performed stereotactically via a craniotomy.

### Packaging and Promoters Generally

[1122] Ways to package RNA-targeting effector protein (CRISPR-Cas proteins) coding nucleic acid molecules, e.g., DNA, into vectors, e.g., viral vectors, to mediate genome modification in vivo include:

[1123] Single Virus Vector:
[1124] Vector containing two or more expression cassettes:
[1125] Promoter-nucleic acid-targeting effector protein coding nucleic acid molecule-terminator
[1126] Promoter-guide RNA1-terminator
[1127] Promoter-guide RNA (N)-terminator (up to size limit of vector)

[1128] Double Virus Vector:
[1129] Vector 1 containing one expression cassette for driving the expression of RNA-targeting effector protein (CRISPR-Cas)
[1130] Promoter-RNA-targeting effector (CRISPR-Cas) protein coding nucleic acid molecule-terminator
[1131] Vector 2 containing one more expression cassettes for driving the expression of one or more guideRNAs or crRNAs
[1132] Promoter-guide RNA1 or crRNA1-terminator
[1133] Promoter-guide RNA1 (N) or crRNA1 (N)-terminator (up to size limit of vector).

[1134] The promoter used to drive RNA-targeting effector protein coding nucleic acid molecule expression can include AAV ITR can serve as a promoter: this is advantageous for eliminating the need for an additional promoter element (which can take up space in the vector). The additional space freed up can be used to drive the expression of additional elements (gRNA, etc.). Also, ITR activity is relatively weaker, so can be used to reduce potential toxicity due to over expression of nucleic acid-targeting effector protein. For ubiquitous expression, can use promoters: CMV, CAG, CBh, PGK, SV40, Ferritin heavy or light chains, etc. For brain or other CNS expression, can use promoters: SynapsinI for all neurons, CaMKIIalpha for excitatory neurons, GAD67 or GAD65 or VGAT for GABAergic neurons, etc. For liver expression, can use Albumin promoter. For lung expression, can use SP-B. For endothelial cells, can use ICAM. For hematopoietic cells can use IFNbeta or CD45. For Osteoblasts can use OG-2. The promoter used to drive guide RNA can include: Pol III promoters such as U6 or H1; Pol II promoter and intronic cassettes to express guide RNA or crRNA.

### Adeno Associated Virus (AAV)

[1135] CRISPR-Cas and one or more guide RNA or crRNA can be delivered using adeno associated virus (AAV), lentivirus, adenovirus or other plasmid or viral vector types, in particular, using formulations and doses from, for example, U.S. Pat. No. 8,454,972 (formulations, doses for adenovirus), U.S. Pat. No. 8,404,658 (formulations, doses for AAV) and 5,846,946 (formulations, doses for DNA plasmids) and from clinical trials and publications regarding the clinical trials involving lentivirus, AAV and adenovirus. For examples, for AAV, the route of administration, formulation and dose can be as in U.S. Pat. No. 8,454,972 and as in clinical trials involving AAV. For Adenovirus, the route of administration, formulation and dose can be as in U.S. Pat. No. 8,404,658 and as in clinical trials involving adenovirus. For plasmid delivery, the route of administration, formulation and dose can be as in U.S. Pat. No. 5,846,946 and as in clinical studies involving plasmids. Doses may be based on or extrapolated to an average 70 kg individual (e.g., a male adult human), and can be adjusted for patients, subjects, mammals of different weight and species. Frequency of administration is within the ambit of the medical or veterinary practitioner (e.g., physician, veterinarian), depending on usual factors including the age, sex, general health, other conditions of the patient or subject and the particular condition or symptoms being addressed. The viral vectors can be injected into the tissue of interest. For cell-type specific genome modification, the expression of RNA-targeting effector protein (CRISPR-Cas effector protein) can be driven by a cell-type specific promoter. For example, liver-specific expression might use the Albumin promoter and neuron-specific expression (e.g., for targeting CNS disorders) might use the Synapsin I promoter. In terms of in vivo delivery, AAV is advantageous over other viral vectors for a couple of reasons: Low toxicity (this may be due to the purification method not requiring ultra centrifugation of cell particles that can activate the immune response) and Low probability of causing insertional mutagenesis because it doesn't integrate into the host genome.

[1136] AAV has a packaging limit of 4.5 or 4.75 Kb. This means that the RNA-targeting effector protein (CRISPR-Cas effector protein) coding sequence as well as a promoter and transcription terminator have to be all fit into the same viral vector. As to AAV, the AAV can be AAV1, AAV2, AAVS or any combination thereof. One can select the AAV of the AAV with regard to the cells to be targeted; e.g., one can select AAV serotypes 1, 2, 5 or a hybrid capsid AAV1, AAV2, AAVS or any combination thereof for targeting brain or neuronal cells; and one can select AAV4 for targeting cardiac tissue. AAV8 is useful for delivery to the liver. The herein promoters and vectors are preferred individually. A tabulation of certain AAV serotypes as to these cells (see Grimm, D. et al, J. Virol. 82: 5887-5911 (2008)) is as follows:

TABLE 9

| Cell Line | AAV-1 | AAV-2 | AAV-3 | AAV-4 | AAV-5 | AAV-6 | AAV-8 | AAV-9 |
|---|---|---|---|---|---|---|---|---|
| Huh-7 | 13 | 100 | 2.5 | 0.0 | 0.1 | 10 | 0.7 | 0.0 |
| HEK293 | 25 | 100 | 2.5 | 0.1 | 0.1 | 5 | 0.7 | 0.1 |
| HeLa | 3 | 100 | 2.0 | 0.1 | 6.7 | 1 | 0.2 | 0.1 |
| HepG2 | 3 | 100 | 16.7 | 0.3 | 1.7 | 5 | 0.3 | ND |
| Hep1A | 20 | 100 | 0.2 | 1.0 | 0.1 | 1 | 0.2 | 0.0 |
| 911 | 17 | 100 | 11 | 0.2 | 0.1 | 17 | 0.1 | ND |
| CHO | 100 | 100 | 14 | 1.4 | 333 | 50 | 10 | 1.0 |
| COS | 33 | 100 | 33 | 3.3 | 5.0 | 14 | 2.0 | 0.5 |
| MeWo | 10 | 100 | 20 | 0.3 | 6.7 | 10 | 1.0 | 0.2 |
| NIH3T3 | 10 | 100 | 2.9 | 2.9 | 0.3 | 10 | 0.3 | ND |
| A549 | 14 | 100 | 20 | ND | 0.5 | 10 | 0.5 | 0.1 |
| HT1180 | 20 | 100 | 10 | 0.1 | 0.3 | 33 | 0.5 | 0.1 |
| Monocytes | 1111 | 100 | ND | ND | 125 | 1429 | ND | ND |
| Immature DC | 2500 | 100 | ND | ND | 222 | 2857 | ND | ND |
| Mature DC | 2222 | 100 | ND | ND | 333 | 3333 | ND | ND |

### Lentivirus

[1137] Lentiviruses are complex retroviruses that have the ability to infect and express their genes in both mitotic and post-mitotic cells. The most commonly known lentivirus is the human immunodeficiency virus (HIV), which uses the envelope glycoproteins of other viruses to target a broad range of cell types. Lentiviruses may be prepared as follows. After cloning pCasES10 (which contains a lentiviral transfer plasmid backbone), HEK293FT at low passage (p=5) were seeded in a T-75 flask to 50% confluence the day before transfection in DMEM with 10% fetal bovine serum and without antibiotics. After 20 hours, media was changed to OptiMEM (serum-free) media and transfection was done 4 hours later. Cells were transfected with 10 μg of lentiviral transfer plasmid (pCasES10) and the following packaging plasmids: 5 μg of pMD2.G (VSV-g pseudotype), and 7.5 ug of psPAX2 (gag/pol/rev/tat). Transfection was done in 4 mL OptiMEM with a cationic lipid delivery agent (50 uL Lipofectamine 2000 and 100 ul Plus reagent). After 6 hours, the media was changed to antibiotic-free DMEM with 10% fetal bovine serum. These methods use serum during cell culture, but serum-free methods are preferred.

[1138] Lentivirus may be purified as follows. Viral supernatants were harvested after 48 hours. Supernatants were first cleared of debris and filtered through a 0.45 um low protein binding (PVDF) filter. They were then spun in a ultracentrifuge for 2 hours at 24,000 rpm. Viral pellets were resuspended in 50 ul of DMEM overnight at 4 C. They were then aliquotted and immediately frozen at −80° C.

[1139] In another embodiment, minimal non-primate lentiviral vectors based on the equine infectious anemia virus (EIAV) are also contemplated, especially for ocular gene therapy (see, e.g., Balagaan, J Gene Med 2006; 8: 275-285). In another embodiment, RetinoStat®, an equine inffctious anemia virus-based lentiviral gene therapy vector that expresses angiostatic proteins endostatin and angiostatin that is delivered via a subretinal injection for the treatment of the web form of age-related macular degeneration is also contemplated (see, e.g., Binley et al., HUMAN GENE THERAPY 23:980-991 (September 2012)) and this vector may be modified for the nucleic acid-targeting system of the present invention.

[1140] In another embodiment, self-inactivating lentiviral vectors with an siRNA targeting a common exon shared by HIV tat/rev, a nucleolar-localizing TAR decoy, and an anti-CCR5-specific hammerhead ribozyme (see, e.g., DiGiusto et al. (2010) Sci Transl Med 2:36ra43) may be used/ and or adapted to the nucleic acid-targeting system of the present invention. A minimum of 2.5×106 CD34+ cells per kilogram patient weight may be collected and prestimulated for 16 to 20 hours in X-VIVO 15 medium (Lonza) containing 2 μmol/L-glutamine, stem cell factor (100 ng/ml), Flt-3 ligand (Flt-3L) (100 ng/ml), and thrombopoietin (10 ng/ml) (CellGenix) at a density of 2×106 cells/ml. Prestimulated cells may be transduced with lentiviral at a multiplicity of infection of 5 for 16 to 24 hours in 75-cm2 tissue culture flasks coated with fibronectin (25 mg/cm2) (RetroNectin, Takara Bio Inc.).

[1141] Lentiviral vectors have been disclosed as in the treatment for Parkinson's Disease, see, e.g., US Patent Publication No. 20120295960 and U.S. Pat. Nos. 7,303,910 and 7,351,585. Lentiviral vectors have also been disclosed for the treatment of ocular diseases, see e.g., US Patent Publication Nos. 20060281180, 20090007284, US20110117189; US20090017543; US20070054961, US20100317109. Lentiviral vectors have also been disclosed for delivery to the brain, see, e.g., US Patent Publication Nos. US20110293571; US20110293571, US20040013648, US20070025970, US20090111106 and U.S. Pat. No. 7,259,015.

### RNA Delivery

[1142] RNA delivery: The nucleic acid-targeting CRISPR-Cas protein, and/or guide RNA, can also be delivered in the form of RNA. mRNA can be synthesized using a PCR cassette containing the following elements: T7_promoter-kozak sequence (GCCACC)-effector protrein-3′ UTR from beta globin-polyA tail (a string of 120 or more adenines). The cassette can be used for transcription by T7 polymerase. Guide RNAs or crRNAs can also be transcribed using in vitro transcription from a cassette containing T7_promoter-GG-guide RNA or crRNA sequence.

Particle Delivery Systems and/or Formulations:

[1143] Several types of particle delivery systems and/or formulations are known to be useful in a diverse spectrum of biomedical applications. In general, a particle is defined as a small object that behaves as a whole unit with respect to its transport and properties. Particles are further classified according to diameter. Coarse particles cover a range between 2,500 and 10,000 nanometers. Fine particles are sized between 100 and 2,500 nanometers. Ultrafine particles, or nanoparticles, are generally between 1 and 100 nanometers in size. The basis of the 100-nm limit is the fact that novel properties that differentiate particles from the bulk material typically develop at a critical length scale of under 100 nm.

[1144] As used herein, a particle delivery system/formulation is defined as any biological delivery system/formulation which includes a particle in accordance with the present invention. A particle in accordance with the present invention is any entity having a greatest dimension (e.g. diameter) of less than 100 microns (μm). In some embodiments, inventive particles have a greatest dimension of less than 10 μm. In some embodiments, inventive particles have a greatest dimension of less than 2000 nanometers (nm). In some embodiments, inventive particles have a greatest dimension of less than 1000 nanometers (nm). In some embodiments, inventive particles have a greatest dimension of less than 900 nm, 800 nm, 700 nm, 600 nm, 500 nm, 400 nm, 300 nm, 200 nm, or 100 nm. Typically, inventive particles have a greatest dimension (e.g., diameter) of 500 nm or less. In some embodiments, inventive particles have a greatest dimension (e.g., diameter) of 250 nm or less. In some embodiments, inventive particles have a greatest dimension (e.g., diameter) of 200 nm or less. In some embodiments, inventive particles have a greatest dimension (e.g., diameter) of 150 nm or less. In some embodiments, inventive particles have a greatest dimension (e.g., diameter) of 100 nm or less. Smaller particles, e.g., having a greatest dimension of 50 nm or less are used in some embodiments of the invention. In some embodiments, inventive particles have a greatest dimension ranging between 25 nm and 200 nm.

[1145] Particle characterization (including e.g., characterizing morphology, dimension, etc.) is done using a variety of different techniques. Common techniques are electron microscopy (TEM, SEM), atomic force microscopy (AFM), dynamic light scattering (DLS), X-ray photoelectron spectroscopy (XPS), powder X-ray diffraction (XRD), Fourier transform infrared spectroscopy (FTIR), matrix-assisted laser desorption/ionization time-of-flight mass spectrometry (MALDI-TOF), ultraviolet-visible spectroscopy, dual polarisation interferometry and nuclear magnetic resonance (NMR). Characterization (dimension measurements) may be made as to native particles (i.e., preloading) or after loading of the cargo (herein cargo refers to e.g., one or more components of CRISPR-Cas system e.g., CRISPR-Cas enzyme or mRNA or guide RNA, or any combination thereof, and may include additional carriers and/or excipients) to provide particles of an optimal size for delivery for any in vitro, ex vivo and/or in vivo application of the present invention. In certain preferred embodiments, particle dimension (e.g., diameter) characterization is based on measurements using dynamic laser scattering (DLS). Mention is made of U.S. Pat. Nos. 8,709,843; 6,007,845; 5,855,913; 5,985,309; 5,543,158; and the publication by James E. Dahlman and Carmen Barnes et al. Nature Nanotechnology (2014) published online 11 May 2014, doi:10.1038/nnano.2014.84, concerning particles, methods of making and using them and measurements thereof. See also Dahlman et al. “Orthogonal gene control with a catalytically active Cas9 nuclease,” Nature Biotechnology 33, 1159-1161 (November, 2015)

[1146] Particles delivery systems within the scope of the present invention may be provided in any form, including but not limited to solid, semi-solid, emulsion, or colloidal particles. As such any of the delivery systems described herein, including but not limited to, e.g., lipid-based systems, liposomes, micelles, microvesicles, exosomes, or gene gun may be provided as particle delivery systems within the scope of the present invention.

### Particles

[1147] CRISPR-Cas mRNA and guide RNA or crRNA may be delivered simultaneously using particles or lipid envelopes; for instance, CRISPR enzyme and RNA of the invention, e.g., as a complex, can be delivered via a particle as in Dahlman et al., WO2015089419 A2 and documents cited therein, such as 7C1 (see, e.g., James E. Dahlman and Carmen Barnes et al. Nature Nanotechnology (2014) published online 11 May 2014, doi:10.1038/nnano.2014.84), e.g., delivery particle comprising lipid or lipidoid and hydrophilic polymer, e.g., cationic lipid and hydrophilic polymer, for instance wherein the cationic lipid comprises 1,2-dioleoyl-3-trimethylammonium-propane (DOTAP) or 1,2-ditetradecanoyl-sn-glycero-3-phosphocholine (DMPC) and/or wherein the hydrophilic polymer comprises ethylene glycol or polyethylene glycol (PEG); and/or wherein the particle further comprises cholesterol (e.g., particle from formulation 1=DOTAP 100, DMPC 0, PEG 0, Cholesterol 0; formulation number 2=DOTAP 90, DMPC 0, PEG 10, Cholesterol 0; formulation number 3=DOTAP 90, DMPC 0, PEG 5, Cholesterol 5), wherein particles are formed using an efficient, multistep process wherein first, effector protein and RNA are mixed together, e.g., at a 1:1 molar ratio, e.g., at room temperature, e.g., for 30 minutes, e.g., in sterile, nuclease free 1×PBS; and separately, DOTAP, DMPC, PEG, and cholesterol as applicable for the formulation are dissolved in alcohol, e.g., 100% ethanol; and, the two solutions are mixed together to form particles containing the complexes). CRISPR-Cas effector protein mRNA and guide RNA may be delivered simultaneously using particles or lipid envelopes. This Dahlman et al technology can be applied in the instant invention. An epoxide-modified lipid-polymer may be utilized to deliver the nucleic acid-targeting system of the present invention to pulmonary, cardiovascular or renal cells, however, one of skill in the art may adapt the system to deliver to other target organs. Dosage ranging from about 0.05 to about 0.6 mg/kg are envisioned. Dosages over several days or weeks are also envisioned, with a total dosage of about 2 mg/kg. For example, Su X, Fricke J, Kavanagh D G, Irvine D J (“In vitro and in vivo mRNA delivery using lipid-enveloped pH-responsive polymer nanoparticles” Mol Pharm. 2011 Jun. 6; 8(3):774-87. doi: 10.1021/mp100390w. Epub 2011 Apr. 1) describes biodegradable core-shell structured particles with a poly(β-amino ester) (PBAE) core enveloped by a phospholipid bilayer shell. These were developed for in vivo mRNA delivery. The pH-responsive PBAE component was chosen to promote endosome disruption, while the lipid surface layer was selected to minimize toxicity of the polycation core. Such are, therefore, preferred for delivering RNA of the present invention.

[1148] In one embodiment, particles based on self-assembling bioadhesive polymers are contemplated, which may be applied to oral delivery of peptides, intravenous delivery of peptides and nasal delivery of peptides, all to the brain. Other embodiments, such as oral absorption and ocular delivery of hydrophobic drugs are also contemplated. The molecular envelope technology involves an engineered polymer envelope which is protected and delivered to the site of the disease (see, e.g., Mazza, M. et al. ACSNano, 2013. 7(2): 1016-1026; Siew, A., et al. Mol Pharm, 2012. 9(1):14-28; Lalatsa, A., et al. J Contr Rel, 2012. 161(2):523-36; Lalatsa, A., et al., Mol Pharm, 2012. 9(6):1665-80; Lalatsa, A., et al. Mol Pharm, 2012. 9(6):1764-74; Garrett, N. L., et al. J Biophotonics, 2012. 5(5-6):458-68; Garrett, N. L., et al. J Raman Spect, 2012. 43(5):681-688; Ahmad, S., et al. J Royal Soc Interface 2010. 7:S423-33; Uchegbu, I. F. Expert Opin Drug Deliv, 2006. 3(5):629-40; Qu, X., et al. Biomacromolecules, 2006. 7(12):3452-9 and Uchegbu, I. F., et al. Int J Pharm, 2001. 224:185-199). Doses of about 5 mg/kg are contemplated, with single or multiple doses, depending on the target tissue.

[1149] Regarding particles, see, also Alabi et al., Proc Natl Acad Sci USA. 2013 Aug. 6; 110(32):12881-6; Zhang et al., Adv Mater. 2013 Sep. 6; 25(33):4641-5; Jiang et al., Nano Lett. 2013 Mar. 13; 13(3):1059-64; Karagiannis et al., ACS Nano. 2012 Oct. 23; 6(10):8484-7; Whitehead et al., ACS Nano. 2012 Aug. 28; 6(8):6922-9 and Lee et al., Nat Nanotechnol. 2012 Jun. 3; 7(6):389-93.

[1150] US patent application 20110293703 relates to lipidoid compounds are also particularly useful in the administration of polynucleotides, which may be applied to deliver the nucleic acid-targeting system of the present invention. In one aspect, the aminoalcohol lipidoid compounds are combined with an agent to be delivered to a cell or a subject to form microparticles, nanoparticles, liposomes, or micelles. The agent to be delivered by the particles, liposomes, or micelles may be in the form of a gas, liquid, or solid, and the agent may be a polynucleotide, protein, peptide, or small molecule. The aminoalcohol lipidoid compounds may be combined with other aminoalcohol lipidoid compounds, polymers (synthetic or natural), surfactants, cholesterol, carbohydrates, proteins, lipids, etc. to form the particles. These particles may then optionally be combined with a pharmaceutical excipient to form a pharmaceutical composition. US Patent Publication No. 20110293703 also provides methods of preparing the aminoalcohol lipidoid compounds. One or more equivalents of an amine are allowed to react with one or more equivalents of an epoxide-terminated compound under suitable conditions to form an aminoalcohol lipidoid compound of the present invention. In certain embodiments, all the amino groups of the amine are fully reacted with the epoxide-terminated compound to form tertiary amines. In other embodiments, all the amino groups of the amine are not fully reacted with the epoxide-terminated compound to form tertiary amines thereby resulting in primary or secondary amines in the aminoalcohol lipidoid compound. These primary or secondary amines are left as is or may be reacted with another electrophile such as a different epoxide-terminated compound. As will be appreciated by one skilled in the art, reacting an amine with less than excess of epoxide-terminated compound will result in a plurality of different aminoalcohol lipidoid compounds with various numbers of tails. Certain amines may be fully functionalized with two epoxide-derived compound tails while other molecules will not be completely functionalized with epoxide-derived compound tails. For example, a diamine or polyamine may include one, two, three, or four epoxide-derived compound tails off the various amino moieties of the molecule resulting in primary, secondary, and tertiary amines. In certain embodiments, all the amino groups are not fully functionalized. In certain embodiments, two of the same types of epoxide-terminated compounds are used. In other embodiments, two or more different epoxide-terminated compounds are used. The synthesis of the aminoalcohol lipidoid compounds is performed with or without solvent, and the synthesis may be performed at higher temperatures ranging from 30-100° C., preferably at approximately 50-90° C. The prepared aminoalcohol lipidoid compounds may be optionally purified. For example, the mixture of aminoalcohol lipidoid compounds may be purified to yield an aminoalcohol lipidoid compound with a particular number of epoxide-derived compound tails. Or the mixture may be purified to yield a particular stereo- or regioisomer. The aminoalcohol lipidoid compounds may also be alkylated using an alkyl halide (e.g., methyl iodide) or other alkylating agent, and/or they may be acylated.

[1151] US Patent Publication No. 20110293703 also provides libraries of aminoalcohol lipidoid compounds prepared by the inventive methods. These aminoalcohol lipidoid compounds may be prepared and/or screened using high-throughput techniques involving liquid handlers, robots, microtiter plates, computers, etc. In certain embodiments, the aminoalcohol lipidoid compounds are screened for their ability to transfect polynucleotides or other agents (e.g., proteins, peptides, small molecules) into the cell. US Patent Publication No. 20130302401 relates to a class of poly(beta-amino alcohols) (PBAAs) has been prepared using combinatorial polymerization. The inventive PBAAs may be used in biotechnology and biomedical applications as coatings (such as coatings of films or multilayer films for medical devices or implants), additives, materials, excipients, non-biofouling agents, micropatterning agents, and cellular encapsulation agents. When used as surface coatings, these PBAAs elicited different levels of inflammation, both in vitro and in vivo, depending on their chemical structures. The large chemical diversity of this class of materials allowed us to identify polymer coatings that inhibit macrophage activation in vitro. Furthermore, these coatings reduce the recruitment of inflammatory cells, and reduce fibrosis, following the subcutaneous implantation of carboxylated polystyrene microparticles. These polymers may be used to form polyelectrolyte complex capsules for cell encapsulation. The invention may also have many other biological applications such as antimicrobial coatings, DNA or siRNA delivery, and stem cell tissue engineering. The teachings of US Patent Publication No. 20130302401 may be applied to the nucleic acid-targeting system of the present invention.

[1152] In another embodiment, lipid nanoparticles (LNPs) are contemplated. An antitransthyretin small interfering RNA has been encapsulated in lipid nanoparticles and delivered to humans (see, e.g., Coelho et al., N Engl J Med 2013; 369:819-29), and such a system may be adapted and applied to the nucleic acid-targeting system of the present invention. Doses of about 0.01 to about 1 mg per kg of body weight administered intravenously are contemplated. Medications to reduce the risk of infusion-related reactions are contemplated, such as dexamethasone, acetampinophen, diphenhydramine or cetirizine, and ranitidine are contemplated. Multiple doses of about 0.3 mg per kilogram every 4 weeks for five doses are also contemplated. LNPs have been shown to be highly effective in delivering siRNAs to the liver (see, e.g., Tabernero et al., Cancer Discovery, April 2013, Vol. 3, No. 4, pages 363-470) and are therefore contemplated for delivering RNA encoding nucleic acid-targeting effector protein to the liver. A dosage of about four doses of 6 mg/kg of the LNP every two weeks may be contemplated. Tabernero et al. demonstrated that tumor regression was observed after the first 2 cycles of LNPs dosed at 0.7 mg/kg, and by the end of 6 cycles the patient had achieved a partial response with complete regression of the lymph node metastasis and substantial shrinkage of the liver tumors. A complete response was obtained after 40 doses in this patient, who has remained in remission and completed treatment after receiving doses over 26 months. Two patients with RCC and extrahepatic sites of disease including kidney, lung, and lymph nodes that were progressing following prior therapy with VEGF pathway inhibitors had stable disease at all sites for approximately 8 to 12 months, and a patient with PNET and liver metastases continued on the extension study for 18 months (36 doses) with stable disease. However, the charge of the LNP must be taken into consideration. As cationic lipids combined with negatively charged lipids to induce nonbilayer structures that facilitate intracellular delivery. Because charged LNPs are rapidly cleared from circulation following intravenous injection, ionizable cationic lipids with pKa values below 7 were developed (see, e.g., Rosin et al, Molecular Therapy, vol. 19, no. 12, pages 1286-2200, December 2011). Negatively charged polymers such as RNA may be loaded into LNPs at low pH values (e.g., pH 4) where the ionizable lipids display a positive charge. However, at physiological pH values, the LNPs exhibit a low surface charge compatible with longer circulation times. Four species of ionizable cationic lipids have been focused upon, namely 1,2-dilineoyl-3-dimethylammonium-propane (DLinDAP), 1,2-dilinoleyloxy-3-N,N-dimethylaminopropane (DLinDMA), 1,2-dilinoleyloxy-keto-N,N-dimethyl-3-aminopropane (DLinKDMA), and 1,2-dilinoleyl-4-(2-dimethylaminoethyl)-[1,3]-dioxolane (DLinKC2-DMA). It has been shown that LNP siRNA systems containing these lipids exhibit remarkably different gene silencing properties in hepatocytes in vivo, with potencies varying according to the series DLinKC2-DMA>DLinKDMA>DLinDMA>>DLinDAP employing a Factor VII gene silencing model (see, e.g., Rosin et al, Molecular Therapy, vol. 19, no. 12, pages 1286-2200, December 2011). A dosage of 1 μg/ml of LNP or CRISPR-Cas RNA in or associated with the LNP may be contemplated, especially for a formulation containing DLinKC2-DMA.

[1153] Preparation of LNPs and CRISPR-Cas encapsulation may be used/ and or adapted from Rosin et al, Molecular Therapy, vol. 19, no. 12, pages 1286-2200, December 2011). The cationic lipids 1,2-dilineoyl-3-dimethylammonium-propane (DLinDAP), 1,2-dilinoleyloxy-3-N,N-dimethylaminopropane (DLinDMA), 1,2-dilinoleyloxyketo-N,N-dimethyl-3-aminopropane (DLinK-DMA), 1,2-dilinoleyl-4-(2-dimethylaminoethyl)[1,3]-dioxolane (DLinKC2-DMA), (3-o-[2″-(methoxypolyethyleneglycol 2000) succinoyl]-1,2-dimyristoyl-sn-glycol (PEG-S-DMG), and R-3-[(w-methoxy-poly(ethylene glycol)2000) carbamoyl]-1,2-dimyristyloxlpropyl-3-amine (PEG-C-DOMG) may be provided by Tekmira Pharmaceuticals (Vancouver, Canada) or synthesized. Cholesterol may be purchased from Sigma (St Louis, Mo.). The specific nucleic acid-targeting complex (CRISPR-Cas) RNA may be encapsulated in LNPs containing DLinDAP, DLinDMA, DLinK-DMA, and DLinKC2-DMA (cationic lipid:DSPC:CHOL:PEGS-DMG or PEG-C-DOMG at 40:10:40:10 molar ratios). When required, 0.2% SP-DiOC18 (Invitrogen, Burlington, Canada) may be incorporated to assess cellular uptake, intracellular delivery, and biodistribution. Encapsulation may be performed by dissolving lipid mixtures comprised of cationic lipid:DSPC:cholesterol:PEG-c-DOMG (40:10:40:10 molar ratio) in ethanol to a final lipid concentration of 10 mmol/1. This ethanol solution of lipid may be added drop-wise to 50 mmol/1 citrate, pH 4.0 to form multilamellar vesicles to produce a final concentration of 30% ethanol vol/vol. Large unilamellar vesicles may be formed following extrusion of multilamellar vesicles through two stacked 80 nm Nuclepore polycarbonate filters using the Extruder (Northern Lipids, Vancouver, Canada). Encapsulation may be achieved by adding RNA dissolved at 2 mg/ml in 50 mmol/1 citrate, pH 4.0 containing 30% ethanol vol/vol drop-wise to extruded preformed large unilamellar vesicles and incubation at 31° C. for 30 minutes with constant mixing to a final RNA/lipid weight ratio of 0.06/1 wt/wt. Removal of ethanol and neutralization of formulation buffer were performed by dialysis against phosphate-buffered saline (PBS), pH 7.4 for 16 hours using Spectra/Por 2 regenerated cellulose dialysis membranes. Particle size distribution may be determined by dynamic light scattering using a NICOMP 370 particle sizer, the vesicle/intensity modes, and Gaussian fitting (Nicomp Particle Sizing, Santa Barbara, Calif.). The particle size for all three LNP systems may be ˜70 nm in diameter. RNA encapsulation efficiency may be determined by removal of free RNA using VivaPureD MiniH columns (Sartorius Stedim Biotech) from samples collected before and after dialysis. The encapsulated RNA may be extracted from the eluted particles and quantified at 260 nm. RNA to lipid ratio was determined by measurement of cholesterol content in vesicles using the Cholesterol E enzymatic assay from Wako Chemicals USA (Richmond, Va.). In conjunction with the herein discussion of LNPs and PEG lipids, PEGylated liposomes or LNPs are likewise suitable for delivery of a nucleic acid-targeting system or components thereof. Preparation of large LNPs may be used/ and or adapted from Rosin et al, Molecular Therapy, vol. 19, no. 12, pages 1286-2200, December 2011. A lipid premix solution (20.4 mg/ml total lipid concentration) may be prepared in ethanol containing DLinKC2-DMA, DSPC, and cholesterol at 50:10:38.5 molar ratios. Sodium acetate may be added to the lipid premix at a molar ratio of 0.75:1 (sodium acetate:DLinKC2-DMA). The lipids may be subsequently hydrated by combining the mixture with 1.85 volumes of citrate buffer (10 mmol/1, pH 3.0) with vigorous stirring, resulting in spontaneous liposome formation in aqueous buffer containing 35% ethanol. The liposome solution may be incubated at 37° C. to allow for time-dependent increase in particle size. Aliquots may be removed at various times during incubation to investigate changes in liposome size by dynamic light scattering (Zetasizer Nano Z S, Malvern Instruments, Worcestershire, UK). Once the desired particle size is achieved, an aqueous PEG lipid solution (stock=10 mg/ml PEG-DMG in 35% (vol/vol) ethanol) may be added to the liposome mixture to yield a final PEG molar concentration of 3.5% of total lipid. Upon addition of PEG-lipids, the liposomes should their size, effectively quenching further growth. RNA may then be added to the empty liposomes at a RNA to total lipid ratio of approximately 1:10 (wt:wt), followed by incubation for 30 minutes at 37° C. to form loaded LNPs. The mixture may be subsequently dialyzed overnight in PBS and filtered with a 0.45-μm syringe filter.

[1154] Spherical Nucleic Acid (SNA™) constructs and other particles (particularly gold particles) are also contemplated as a means to delivery nucleic acid-targeting system to intended targets. Significant data show that AuraSense Therapeutics' Spherical Nucleic Acid (SNA™) constructs, based upon nucleic acid-functionalized gold particles, are useful.

[1155] Literature that may be employed in conjunction with herein teachings include: Cutler et al., J. Am. Chem. Soc. 2011 133:9254-9257, Hao et al., Small. 2011 7:3158-3162, Zhang et al., ACS Nano. 2011 5:6962-6970, Cutler et al., J. Am. Chem. Soc. 2012 134:1376-1391, Young et al., Nano Lett. 2012 12:3867-71, Zheng et al., Proc. Natl. Acad. Sci. USA. 2012 109:11975-80, Mirkin, Nanomedicine 2012 7:635-638 Zhang et al., J. Am. Chem. Soc. 2012 134:16488-1691, Weintraub, Nature 2013 495:S14-S16, Choi et al., Proc. Natl. Acad. Sci. USA. 2013 110(19):7625-7630, Jensen et al., Sci. Transl. Med. 5, 209ra152 (2013) and Mirkin, et al., Small, 10:186-192.

[1156] Self-assembling particles with RNA may be constructed with polyethyleneimine (PEI) that is PEGylated with an Arg-Gly-Asp (RGD) peptide ligand attached at the distal end of the polyethylene glycol (PEG). This system has been used, for example, as a means to target tumor neovasculature expressing integrins and deliver siRNA inhibiting vascular endothelial growth factor receptor-2 (VEGF R2) expression and thereby achieve tumor angiogenesis (see, e.g., Schiffelers et al., Nucleic Acids Research, 2004, Vol. 32, No. 19). Nanoplexes may be prepared by mixing equal volumes of aqueous solutions of cationic polymer and nucleic acid to give a net molar excess of ionizable nitrogen (polymer) to phosphate (nucleic acid) over the range of 2 to 6. The electrostatic interactions between cationic polymers and nucleic acid resulted in the formation of polyplexes with average particle size distribution of about 100 nm, hence referred to here as nanoplexes. A dosage of about 100 to 200 mg of nucleic acid-targeting complex RNA is envisioned for delivery in the self-assembling particles of Schiffelers et al.

[1157] The nanoplexes of Bartlett et al. (PNAS, Sep. 25, 2007,vol. 104, no. 39) may also be applied to the present invention. The nanoplexes of Bartlett et al. are prepared by mixing equal volumes of aqueous solutions of cationic polymer and nucleic acid to give a net molar excess of ionizable nitrogen (polymer) to phosphate (nucleic acid) over the range of 2 to 6. The electrostatic interactions between cationic polymers and nucleic acid resulted in the formation of polyplexes with average particle size distribution of about 100 nm, hence referred to here as nanoplexes. The DOTA-siRNA of Bartlett et al. was synthesized as follows: 1,4,7,10-tetraazacyclododecane-1,4,7,10-tetraacetic acid mono(N-hydroxysuccinimide ester) (DOTA-NHSester) was ordered from Macrocyclics (Dallas, Tex.). The amine modified RNA sense strand with a 100-fold molar excess of DOTA-NHS-ester in carbonate buffer (pH 9) was added to a microcentrifuge tube. The contents were reacted by stirring for 4 h at room temperature. The DOTA-RNAsense conjugate was ethanol-precipitated, resuspended in water, and annealed to the unmodified antisense strand to yield DOTA-siRNA. All liquids were pretreated with Chelex-100 (Bio-Rad, Hercules, Calif.) to remove trace metal contaminants. Tf-targeted and nontargeted siRNA particles may be formed by using cyclodextrin-containing polycations. Typically, particles were formed in water at a charge ratio of 3 (+/−) and an siRNA concentration of 0.5 g/liter. One percent of the adamantane-PEG molecules on the surface of the targeted particles were modified with Tf (adamantane-PEG-Tf). The particles were suspended in a 5% (wt/vol) glucose carrier solution for injection.

[1158] Davis et al. (Nature, Vol 464, 15 Apr. 2010) conducts a RNA clinical trial that uses a targeted particle-delivery system (clinical trial registration number NCT00689065). Patients with solid cancers refractory to standard-of-care therapies are administered doses of targeted particles on days 1, 3, 8 and 10 of a 21-day cycle by a 30-min intravenous infusion. The particles comprise, consist essentially of, or consist of a synthetic delivery system containing: (1) a linear, cyclodextrin-based polymer (CDP), (2) a human transferrin protein (TF) targeting ligand displayed on the exterior of the nanoparticle to engage TF receptors (TFR) on the surface of the cancer cells, (3) a hydrophilic polymer (polyethylene glycol (PEG) used to promote nanoparticle stability in biological fluids), and (4) siRNA designed to reduce the expression of the RRM2 (sequence used in the clinic was previously denoted siR2B+5). The TFR has long been known to be upregulated in malignant cells, and RRM2 is an established anti-cancer target. These particles (clinical version denoted as CALAA-01) have been shown to be well tolerated in multi-dosing studies in non-human primates. Although a single patient with chronic myeloid leukemia has been administered siRNA by liposomal delivery, Davis et al.'s clinical trial is the initial human trial to systemically deliver siRNA with a targeted delivery system and to treat patients with solid cancer. To ascertain whether the targeted delivery system can provide effective delivery of functional siRNA to human tumours, Davis et al. investigated biopsies from three patients from three different dosing cohorts; patients A, B and C, all of whom had metastatic melanoma and received CALAA-01 doses of 18, 24 and 30 mg m-2 siRNA, respectively. Similar doses may also be contemplated for the nucleic acid-targeting system of the present invention. The delivery of the invention may be achieved with particles containing a linear, cyclodextrin-based polymer (CDP), a human transferrin protein (TF) targeting ligand displayed on the exterior of the particle to engage TF receptors (TFR) on the surface of the cancer cells and/or a hydrophilic polymer (for example, polyethylene glycol (PEG) used to promote particle stability in biological fluids).

[1159] In terms of this invention, it is preferred to have one or more components of RNA-targeting complex, e.g., nucleic acid-targeting effector (CRISPR-Cas) protein or mRNA therefor, or guide RNA or crRNA delivered using particles or lipid envelopes. Other delivery systems or vectors are may be used in conjunction with the particle aspects of the invention. Particles encompassed in the present invention may be provided in different forms, e.g., as solid particles (e.g., metal such as silver, gold, iron, titanium), non-metal, lipid-based solids, polymers), suspensions of particles, or combinations thereof. Metal, dielectric, and semiconductor particles may be prepared, as well as hybrid structures (e.g., core-shell particles). Particles made of semiconducting material may also be labeled quantum dots if they are small enough (typically sub 10 nm) that quantization of electronic energy levels occurs. Such nanoscale particles are used in biomedical applications as drug carriers or imaging agents and may be adapted for similar purposes in the present invention.

[1160] Semi-solid and soft particles have been manufactured, and are within the scope of the present invention. A prototype particle of semi-solid nature is the liposome. Various types of liposome particles are currently used clinically as delivery systems for anticancer drugs and vaccines. Particles with one half hydrophilic and the other half hydrophobic are termed Janus particles and are particularly effective for stabilizing emulsions. They can self-assemble at water/oil interfaces and act as solid surfactants.

[1161] U.S. Pat. No. 8,709,843, incorporated herein by reference, provides a drug delivery system for targeted delivery of therapeutic agent-containing particles to tissues, cells, and intracellular compartments. The invention provides targeted particles comprising polymer conjugated to a surfactant, hydrophilic polymer or lipid. U.S. Pat. No. 6,007,845, incorporated herein by reference, provides particles which have a core of a multiblock copolymer formed by covalently linking a multifunctional compound with one or more hydrophobic polymers and one or more hydrophilic polymers, and contain a biologically active material. U.S. Pat. No. 5,855,913, incorporated herein by reference, provides a particulate composition having aerodynamically light particles having a tap density of less than 0.4 g/cm3 with a mean diameter of between 5 μm and 30 μm, incorporating a surfactant on the surface thereof for drug delivery to the pulmonary system. U.S. Pat. No. 5,985,309, incorporated herein by reference, provides particles incorporating a surfactant and/or a hydrophilic or hydrophobic complex of a positively or negatively charged therapeutic or diagnostic agent and a charged molecule of opposite charge for delivery to the pulmonary system. U.S. Pat. No. 5,543,158, incorporated herein by reference, provides biodegradable injectable particles having a biodegradable solid core containing a biologically active material and poly(alkylene glycol) moieties on the surface. WO2012135025 (also published as US20120251560), incorporated herein by reference, describes conjugated polyethyleneimine (PEI) polymers and conjugated aza-macrocycles (collectively referred to as “conjugated lipomer” or “lipomers”). In certain embodiments, it can be envisioned that such methods and materials of herein-cited documents, e.g., conjugated lipomers can be used in the context of the nucleic acid-targeting system to achieve in vitro, ex vivo and in vivo genomic perturbations to modify gene expression, including modulation of protein expression.

### Exosomes

[1162] Exosomes are endogenous nano-vesicles that transport RNAs and proteins, and which can deliver RNA to the brain and other target organs. To reduce immunogenicity, Alvarez-Erviti et al. (2011, Nat Biotechnol 29: 341) used self-derived dendritic cells for exosome production. Targeting to the brain was achieved by engineering the dendritic cells to express Lamp2b, an exosomal membrane protein, fused to the neuron-specific RVG peptide. Purified exosomes were loaded with exogenous RNA by electroporation. Intravenously injected RVG-targeted exosomes delivered GAPDH siRNA specifically to neurons, microglia, oligodendrocytes in the brain, resulting in a specific gene knockdown. Pre-exposure to RVG exosomes did not attenuate knockdown, and non-specific uptake in other tissues was not observed. The therapeutic potential of exosome-mediated siRNA delivery was demonstrated by the strong mRNA (60%) and protein (62%) knockdown of BACE1, a therapeutic target in Alzheimer's disease.

[1163] To obtain a pool of immunologically inert exosomes, Alvarez-Erviti et al. harvested bone marrow from inbred C57BL/6 mice with a homogenous major histocompatibility complex (MHC) haplotype. As immature dendritic cells produce large quantities of exosomes devoid of T-cell activators such as MHC-II and CD86, Alvarez-Erviti et al. selected for dendritic cells with granulocyte/macrophage-colony stimulating factor (GM-CSF) for 7 d. Exosomes were purified from the culture supernatant the following day using well-established ultracentrifugation protocols. The exosomes produced were physically homogenous, with a size distribution peaking at 80 nm in diameter as determined by particle tracking analysis (NTA) and electron microscopy. Alvarez-Erviti et al. obtained 6-12 μg of exosomes (measured based on protein concentration) per 10⁶ cells. Next, Alvarez-Erviti et al. investigated the possibility of loading modified exosomes with exogenous cargoes using electroporation protocols adapted for nanoscale applications. As electroporation for membrane particles at the nanometer scale is not well-characterized, nonspecific Cy5-labeled RNA was used for the empirical optimization of the electroporation protocol. The amount of encapsulated RNA was assayed after ultracentrifugation and lysis of exosomes. Electroporation at 400 V and 125 μF resulted in the greatest retention of RNA and was used for all subsequent experiments. Alvarez-Erviti et al. administered 150 μg of each BACE1 siRNA encapsulated in 150 μg of RVG exosomes to normal C57BL/6 mice and compared the knockdown efficiency to four controls: untreated mice, mice injected with RVG exosomes only, mice injected with BACE1 siRNA complexed to an in vivo cationic liposome reagent and mice injected with BACE1 siRNA complexed to RVG-9R, the RVG peptide conjugated to 9 D-arginines that electrostatically binds to the siRNA. Cortical tissue samples were analyzed 3 d after administration and a significant protein knockdown (45%, P<0.05, versus 62%, P<0.01) in both siRNA-RVG-9R-treated and siRNARVG exosome-treated mice was observed, resulting from a significant decrease in BACE1 mRNA levels (66% [+ or −] 15%, P<0.001 and 61% [+ or −] 13% respectively, P<0.01). Moreover, Applicants demonstrated a significant decrease (55%, P<0.05) in the total [beta]-amyloid 1-42 levels, a main component of the amyloid plaques in Alzheimer's pathology, in the RVG-exosome-treated animals. The decrease observed was greater than the β-amyloid 1-40 decrease demonstrated in normal mice after intraventricular injection of BACE1 inhibitors. Alvarez-Erviti et al. carried out 5′-rapid amplification of cDNA ends (RACE) on BACE1 cleavage product, which provided evidence of RNAi-mediated knockdown by the siRNA. Finally, Alvarez-Erviti et al. investigated whether RNA-RVG exosomes induced immune responses in vivo by assessing IL-6, IP-10, TNFα and IFN-α serum concentrations. Following exosome treatment, nonsignificant changes in all cytokines were registered similar to siRNA-transfection reagent treatment in contrast to siRNA-RVG-9R, which potently stimulated IL-6 secretion, confirming the immunologically inert profile of the exosome treatment. Given that exosomes encapsulate only 20% of siRNA, delivery with RVG-exosome appears to be more efficient than RVG-9R delivery as comparable mRNA knockdown and greater protein knockdown was achieved with fivefold less siRNA without the corresponding level of immune stimulation. This experiment demonstrated the therapeutic potential of RVG-exosome technology, which is potentially suited for long-term silencing of genes related to neurodegenerative diseases. The exosome delivery system of Alvarez-Erviti et al. may be applied to deliver the nucleic acid-targeting system of the present invention to therapeutic targets, especially neurodegenerative diseases. A dosage of about 100 to 1000 mg of nucleic acid-targeting system encapsulated in about 100 to 1000 mg of RVG exosomes may be contemplated for the present invention.

[1164] El-Andaloussi et al. (Nature Protocols 7, 2112-2126 (2012)) provides exosomes derived from cultured cells harnessed for delivery of RNA in vitro and in vivo. This protocol first describes the generation of targeted exosomes through transfection of an expression vector, comprising an exosomal protein fused with a peptide ligand. Next, El-Andaloussi et al. explain how to purify and characterize exosomes from transfected cell supernatant. Next, El-Andaloussi et al. detail crucial steps for loading RNA into exosomes. Finally, El-Andaloussi et al. outline how to use exosomes to efficiently deliver RNA in vitro and in vivo in mouse brain. Examples of anticipated results in which exosome-mediated RNA delivery is evaluated by functional assays and imaging are also provided. The entire protocol takes ˜3 weeks. Delivery or administration according to the invention may be performed using exosomes produced from self-derived dendritic cells. From the herein teachings, this can be employed in the practice of the invention

[1165] In another embodiment, the plasma exosomes of Wahlgren et al. (Nucleic Acids Research, 2012, Vol. 40, No. 17 e130) are contemplated. Exosomes are nano-sized vesicles (30-90 nm in size) produced by many cell types, including dendritic cells (DC), B cells, T cells, mast cells, epithelial cells and tumor cells. These vesicles are formed by inward budding of late endosomes and are then released to the extracellular environment upon fusion with the plasma membrane. Because exosomes naturally carry RNA between cells, this property may be useful in gene therapy, and from this disclosure can be employed in the practice of the instant invention. Exosomes from plasma can be prepared by centrifugation of buffy coat at 900 g for 20 min to isolate the plasma followed by harvesting cell supernatants, centrifuging at 300 g for 10 min to eliminate cells and at 16500 g for 30 min followed by filtration through a 0.22 mm filter. Exosomes are pelleted by ultracentrifugation at 120000 g for 70 min. Chemical transfection of siRNA into exosomes is carried out according to the manufacturer's instructions in RNAi Human/Mouse Starter Kit (Quiagen, Hilden, Germany). siRNA is added to 100 ml PBS at a final concentration of 2 mmol/ml. After adding HiPerFect transfection reagent, the mixture is incubated for 10 min at RT. In order to remove the excess of micelles, the exosomes are re-isolated using aldehyde/sulfate latex beads. The chemical transfection of nucleic acid-targeting system into exosomes may be conducted similarly to siRNA. The exosomes may be co-cultured with monocytes and lymphocytes isolated from the peripheral blood of healthy donors. Therefore, it may be contemplated that exosomes containing nucleic acid-targeting system may be introduced to monocytes and lymphocytes of and autologously reintroduced into a human. Accordingly, delivery or administration according to the invention may be performed using plasma exosomes.

### Liposomes

[1166] Delivery or administration according to the invention can be performed with liposomes. Liposomes are spherical vesicle structures composed of a uni- or multilamellar lipid bilayer surrounding internal aqueous compartments and a relatively impermeable outer lipophilic phospholipid bilayer. Liposomes have gained considerable attention as drug delivery carriers because they are biocompatible, nontoxic, can deliver both hydrophilic and lipophilic drug molecules, protect their cargo from degradation by plasma enzymes, and transport their load across biological membranes and the blood brain barrier (BBB) (see, e.g., Spuch and Navarro, Journal of Drug Delivery, vol. 2011, Article ID 469679, 12 pages, 2011. doi:10.1155/2011/469679 for review). Liposomes can be made from several different types of lipids; however, phospholipids are most commonly used to generate liposomes as drug carriers. Although liposome formation is spontaneous when a lipid film is mixed with an aqueous solution, it can also be expedited by applying force in the form of shaking by using a homogenizer, sonicator, or an extrusion apparatus (see, e.g., Spuch and Navarro, Journal of Drug Delivery, vol. 2011, Article ID 469679, 12 pages, 2011. doi:10.1155/2011/469679 for review).

[1167] Several other additives may be added to liposomes in order to modify their structure and properties. For instance, either cholesterol or sphingomyelin may be added to the liposomal mixture in order to help stabilize the liposomal structure and to prevent the leakage of the liposomal inner cargo. Further, liposomes are prepared from hydrogenated egg phosphatidylcholine or egg phosphatidylcholine, cholesterol, and dicetyl phosphate, and their mean vesicle sizes were adjusted to about 50 and 100 nm. (see, e.g., Spuch and Navarro, Journal of Drug Delivery, vol. 2011, Article ID 469679, 12 pages, 2011. doi:10.1155/2011/469679 for review). A liposome formulation may be mainly comprised of natural phospholipids and lipids such as 1,2-distearoryl-sn-glycero-3-phosphatidyl choline (DSPC), sphingomyelin, egg phosphatidylcholines and monosialoganglioside. Since this formulation is made up of phospholipids only, liposomal formulations have encountered many challenges, one of the ones being the instability in plasma. Several attempts to overcome these challenges have been made, specifically in the manipulation of the lipid membrane. One of these attempts focused on the manipulation of cholesterol. Addition of cholesterol to conventional formulations reduces rapid release of the encapsulated bioactive compound into the plasma or 1,2-dioleoyl-sn-glycero-3-phosphoethanolamine (DOPE) increases the stability (see, e.g., Spuch and Navarro, Journal of Drug Delivery, vol. 2011, Article ID 469679, 12 pages, 2011. doi:10.1155/2011/469679 for review). In a particularly advantageous embodiment, Trojan Horse liposomes (also known as Molecular Trojan Horses) are desirable and protocols may be found at cshprotocols.cshlp.org/content/2010/4/pdb.prot5407.long. These particles allow delivery of a transgene to the entire brain after an intravascular injection. Without being bound by limitation, it is believed that neutral lipid particles with specific antibodies conjugated to surface allow crossing of the blood brain barrier via endocytosis. Applicant postulates utilizing Trojan Horse Liposomes to deliver the CRISPR-Cas complexes to the brain via an intravascular injection, which would allow whole brain transgenic animals without the need for embryonic manipulation. About 1-5 g of DNA or RNA may be contemplated for in vivo administration in liposomes.

[1168] In another embodiment, the nucleic acid-targeting system or components thereof may be administered in liposomes, such as a stable nucleic-acid-lipid particle (SNALP) (see, e.g., Morrissey et al., Nature Biotechnology, Vol. 23, No. 8, August 2005). Daily intravenous injections of about 1, 3 or 5 mg/kg/day of a specific nucleic acid-targeting system targeted in a SNALP are contemplated. The daily treatment may be over about three days and then weekly for about five weeks. In another embodiment, a specific nucleic acid-targeting system encapsulated SNALP) administered by intravenous injection to at doses of about 1 or 2.5 mg/kg are also contemplated (see, e.g., Zimmerman et al., Nature Letters, Vol. 441, 4 May 2006). The SNALP formulation may contain the lipids 3-N-[(wmethoxypoly(ethylene glycol) 2000) carbamoyl]-1,2-dimyristyloxy-propylamine (PEG-C-DMA), 1,2-dilinoleyloxy-N,N-dimethyl-3-aminopropane (DLinDMA), 1,2-distearoyl-sn-glycero-3-phosphocholine (DSPC) and cholesterol, in a 2:40:10:48 molar percent ratio (see, e.g., Zimmerman et al., Nature Letters, Vol. 441, 4 May 2006). In another embodiment, stable nucleic-acid-lipid particles (SNALPs) have proven to be effective delivery molecules to highly vascularized HepG2-derived liver tumors but not in poorly vascularized HCT-116 derived liver tumors (see, e.g., Li, Gene Therapy (2012) 19, 775-780). The SNALP liposomes may be prepared by formulating D-Lin-DMA and PEG-C-DMA with distearoylphosphatidylcholine (DSPC), Cholesterol and siRNA using a 25:1 lipid/siRNA ratio and a 48/40/10/2 molar ratio of Cholesterol/D-Lin-DMA/DSPC/PEG-C-DMA. The resulted SNALP liposomes are about 80-100 nm in size. In yet another embodiment, a SNALP may comprise synthetic cholesterol (Sigma-Aldrich, St Louis, Mo., USA), dipalmitoylphosphatidylcholine (Avanti Polar Lipids, Alabaster, Ala., USA), 3-N-[(w-methoxy poly(ethylene glycol)2000)carbamoyl]-1,2-dimyrestyloxypropylamine, and cationic 1,2-dilinoleyloxy-3-N,Ndimethylaminopropane (see, e.g., Geisbert et al., Lancet 2010; 375: 1896-905). A dosage of about 2 mg/kg total nucleic acid-targeting systemper dose administered as, for example, a bolus intravenous infusion may be contemplated. In yet another embodiment, a SNALP may comprise synthetic cholesterol (Sigma-Aldrich), 1,2-distearoyl-sn-glycero-3-phosphocholine (DSPC; Avanti Polar Lipids Inc.), PEG-cDMA, and 1,2-dilinoleyloxy-3-(N;N-dimethyl)aminopropane (DLinDMA) (see, e.g., Judge, J. Clin. Invest. 119:661-673 (2009)). Formulations used for in vivo studies may comprise a final lipid/RNA mass ratio of about 9:1.

[1169] The safety profile of RNAi nanomedicines has been reviewed by Barros and Gollob of Alnylam Pharmaceuticals (see, e.g., Advanced Drug Delivery Reviews 64 (2012) 1730-1737). The stable nucleic acid lipid particle (SNALP) is comprised of four different lipids an ionizable lipid (DLinDMA) that is cationic at low pH, a neutral helper lipid, cholesterol, and a diffusible polyethylene glycol (PEG)-lipid. The particle is approximately 80 nm in diameter and is charge-neutral at physiologic pH. During formulation, the ionizable lipid serves to condense lipid with the anionic RNA during particle formation. When positively charged under increasingly acidic endosomal conditions, the ionizable lipid also mediates the fusion of SNALP with the endosomal membrane enabling release of RNA into the cytoplasm. The PEG-lipid stabilizes the particle and reduces aggregation during formulation, and subsequently provides a neutral hydrophilic exterior that improves pharmacokinetic properties. To date, two clinical programs have been initiated using SNALP formulations with RNA. Tekmira Pharmaceuticals recently completed a phase I single-dose study of SNALP-ApoB in adult volunteers with elevated LDL cholesterol. ApoB is predominantly expressed in the liver and jejunum and is essential for the assembly and secretion of VLDL and LDL. Seventeen subjects received a single dose of SNALP-ApoB (dose escalation across 7 dose levels). There was no evidence of liver toxicity (anticipated as the potential dose-limiting toxicity based on preclinical studies). One (of two) subjects at the highest dose experienced flu-like symptoms consistent with immune system stimulation, and the decision was made to conclude the trial. Alnylam Pharmaceuticals has similarly advanced ALN-TTR01, which employs the SNALP technology described above and targets hepatocyte production of both mutant and wild-type TTR to treat TTR amyloidosis (ATTR). Three ATTR syndromes have been described: familial amyloidotic polyneuropathy (FAP) and familial amyloidotic cardiomyopathy (FAC)—both caused by autosomal dominant mutations in TTR; and senile systemic amyloidosis (SSA) cause by wildtype TTR. A placebo-controlled, single dose-escalation phase I trial of ALN-TTR01 was recently completed in patients with ATTR. ALN-TTR01 was administered as a 15-minute IV infusion to 31 patients (23 with study drug and 8 with placebo) within a dose range of 0.01 to 1.0 mg/kg (based on siRNA). Treatment was well tolerated with no significant increases in liver function tests. Infusion-related reactions were noted in 3 of 23 patients at >0.4 mg/kg; all responded to slowing of the infusion rate and all continued on study. Minimal and transient elevations of serum cytokines IL-6, IP-10 and IL-lra were noted in two patients at the highest dose of 1 mg/kg (as anticipated from preclinical and NHP studies). Lowering of serum TTR, the expected pharmacodynamics effect of ALN-TTR01, was observed at 1 mg/kg.

[1170] In yet another embodiment, a SNALP may be made by solubilizing a cationic lipid, DSPC, cholesterol and PEG-lipid e.g., in ethanol, e.g., at a molar ratio of 40:10:40:10, respectively (see, Semple et al., Nature Niotechnology, Volume 28 Number 2 Feb. 2010, pp. 172-177). The lipid mixture was added to an aqueous buffer (50 mM citrate, pH 4) with mixing to a final ethanol and lipid concentration of 30% (vol/vol) and 6.1 mg/ml, respectively, and allowed to equilibrate at 22° C. for 2 min before extrusion. The hydrated lipids were extruded through two stacked 80 nm pore-sized filters (Nuclepore) at 22° C. using a Lipex Extruder (Northern Lipids) until a vesicle diameter of 70-90 nm, as determined by dynamic light scattering analysis, was obtained. This generally required 1-3 passes. The siRNA (solubilized in a 50 mM citrate, pH 4 aqueous solution containing 30% ethanol) was added to the pre-equilibrated (35° C.) vesicles at a rate of ˜5 ml/min with mixing. After a final target siRNA/lipid ratio of 0.06 (wt/wt) was reached, the mixture was incubated for a further 30 min at 35° C. to allow vesicle reorganization and encapsulation of the siRNA. The ethanol was then removed and the external buffer replaced with PBS (155 mM NaCl, 3 mM Na2HPO4, 1 mM KH2PO4, pH 7.5) by either dialysis or tangential flow diafiltration. siRNA were encapsulated in SNALP using a controlled step-wise dilution method process. The lipid constituents of KC2-SNALP were DLin-KC2-DMA (cationic lipid), dipalmitoylphosphatidylcholine (DPPC; Avanti Polar Lipids), synthetic cholesterol (Sigma) and PEG-C-DMA used at a molar ratio of 57.1:7.1:34.3:1.4. Upon formation of the loaded particles, SNALP were dialyzed against PBS and filter sterilized through a 0.2 μm filter before use. Mean particle sizes were 75-85 nm and 90-95% of the siRNA was encapsulated within the lipid particles. The final siRNA/lipid ratio in formulations used for in vivo testing was ˜0.15 (wt/wt). LNP-siRNA systems containing Factor VII siRNA were diluted to the appropriate concentrations in sterile PBS immediately before use and the formulations were administered intravenously through the lateral tail vein in a total volume of 10 ml/kg. This method and these delivery systems may be extrapolated to the nucleic acid-targeting system of the present invention.

### Other Lipids

[1171] Other cationic lipids, such as amino lipid 2,2-dilinoleyl-4-dimethylaminoethyl-[1,3]-dioxolane (DLin-KC2-DMA) may be utilized to encapsulate nucleic acid-targeting system or components thereof or nucleic acid molecule(s) coding therefor e.g., similar to SiRNA (see, e.g., Jayaraman, Angew. Chem. Int. Ed. 2012, 51, 8529-8533), and hence may be employed in the practice of the invention. A preformed vesicle with the following lipid composition may be contemplated: amino lipid, distearoylphosphatidylcholine (DSPC), cholesterol and (R)-2,3-bis(octadecyloxy) propyl-1-(methoxy poly(ethylene glycol)2000)propylcarbamate (PEG-lipid) in the molar ratio 40/10/40/10, respectively, and a FVII siRNA/total lipid ratio of approximately 0.05 (w/w). To ensure a narrow particle size distribution in the range of 70-90 nm and a low polydispersity index of 0.11+0.04 (n=56), the particles may be extruded up to three times through 80 nm membranes prior to adding the guide RNA. Particles containing the highly potent amino lipid 16 may be used, in which the molar ratio of the four lipid components 16, DSPC, cholesterol and PEG-lipid (50/10/38.5/1.5) which may be further optimized to enhance in vivo activity.

[1172] Michael S D Kormann et al. (“Expression of therapeutic proteins after delivery of chemically modified mRNA in mice: Nature Biotechnology, Volume:29, Pages: 154-157 (2011)) describes the use of lipid envelopes to deliver RNA. Use of lipid envelopes is also preferred in the present invention.

[1173] In another embodiment, lipids may be formulated with the RNA-targeting system (CRISPR-Cas13 complex, i.e., the Cas13 complexed with crRNA) of the present invention or component(s) thereof or nucleic acid molecule(s) coding therefor to form lipid nanoparticles (LNPs). Lipids include, but are not limited to, DLin-KC2-DMA4, C12-200 and colipids disteroylphosphatidyl choline, cholesterol, and PEG-DMG may be formulated with RNA-targeting system instead of siRNA (see, e.g., Novobrantseva, Molecular Therapy—Nucleic Acids (2012) 1, e4; doi:10.1038/mtna.2011.3) using a spontaneous vesicle formation procedure. The component molar ratio may be about 50/10/38.5/1.5 (DLin-KC2-DMA or C12-200/disteroylphosphatidyl choline/cholesterol/PEG-DMG). The final lipid: siRNA weight ratio may be ˜12:1 and 9:1 in the case of DLin-KC2-DMA and C12-200 lipid particles (LNPs), respectively. The formulations may have mean particle diameters of ˜80 nm with >90% entrapment efficiency. A 3 mg/kg dose may be contemplated. Tekmira has a portfolio of approximately 95 patent families, in the U.S. and abroad, that are directed to various aspects of LNPs and LNP formulations (see, e.g., U.S. Pat. Nos. 7,982,027; 7,799,565; 8,058,069; 8,283,333; 7,901,708; 7,745,651; 7,803,397; 8,101,741; 8,188,263; 7,915,399; 8,236,943 and 7,838,658 and European Pat. Nos 1766035; 1519714; 1781593 and 1664316), all of which may be used and/or adapted to the present invention.

[1174] The RNA-targeting system or components thereof or nucleic acid molecule(s) coding therefor may be delivered encapsulated in PLGA Microspheres such as that further described in US published applications 20130252281 and 20130245107 and 20130244279 (assigned to Moderna Therapeutics) which relate to aspects of formulation of compositions comprising modified nucleic acid molecules which may encode a protein, a protein precursor, or a partially or fully processed form of the protein or a protein precursor. The formulation may have a molar ratio 50:10:38.5:1.5-3.0 (cationic lipid:fusogenic lipid:cholesterol:PEG lipid). The PEG lipid may be selected from, but is not limited to PEG-c-DOMG, PEG-DMG. The fusogenic lipid may be DSPC. See also, Schrum et al., Delivery and Formulation of Engineered Nucleic Acids, US published application 20120251618.

[1175] Nanomerics' technology addresses bioavailability challenges for a broad range of therapeutics, including low molecular weight hydrophobic drugs, peptides, and nucleic acid based therapeutics (plasmid, siRNA, miRNA). Specific administration routes for which the technology has demonstrated clear advantages include the oral route, transport across the blood-brain-barrier, delivery to solid tumours, as well as to the eye. See, e.g., Mazza et al., 2013, ACS Nano. 2013 Feb. 26; 7(2):1016-26; Uchegbu and Siew, 2013, J Pharm Sci. 102(2):305-10 and Lalatsa et al., 2012, J Control Release. 2012 Jul. 20; 161(2):523-36.

[1176] US Patent Publication No. 20050019923 describes cationic dendrimers for delivering bioactive molecules, such as polynucleotide molecules, peptides and polypeptides and/or pharmaceutical agents, to a mammalian body. The dendrimers are suitable for targeting the delivery of the bioactive molecules to, for example, the liver, spleen, lung, kidney or heart (or even the brain). Dendrimers are synthetic 3-dimensional macromolecules that are prepared in a step-wise fashion from simple branched monomer units, the nature and functionality of which can be easily controlled and varied. Dendrimers are synthesized from the repeated addition of building blocks to a multifunctional core (divergent approach to synthesis), or towards a multifunctional core (convergent approach to synthesis) and each addition of a 3-dimensional shell of building blocks leads to the formation of a higher generation of the dendrimers. Polypropylenimine dendrimers start from a diaminobutane core to which is added twice the number of amino groups by a double Michael addition of acrylonitrile to the primary amines followed by the hydrogenation of the nitriles. This results in a doubling of the amino groups. Polypropylenimine dendrimers contain 100% protonable nitrogens and up to 64 terminal amino groups (generation 5, DAB 64). Protonable groups are usually amine groups which are able to accept protons at neutral pH. The use of dendrimers as gene delivery agents has largely focused on the use of the polyamidoamine. and phosphorous containing compounds with a mixture of amine/amide or N—P(O₂)S as the conjugating units respectively with no work being reported on the use of the lower generation polypropylenimine dendrimers for gene delivery. Polypropylenimine dendrimers have also been studied as pH sensitive controlled release systems for drug delivery and for their encapsulation of guest molecules when chemically modified by peripheral amino acid groups. The cytotoxicity and interaction of polypropylenimine dendrimers with DNA as well as the transfection efficacy of DAB 64 has also been studied. US Patent Publication No. 20050019923 is based upon the observation that, contrary to earlier reports, cationic dendrimers, such as polypropylenimine dendrimers, display suitable properties, such as specific targeting and low toxicity, for use in the targeted delivery of bioactive molecules, such as genetic material. In addition, derivatives of the cationic dendrimer also display suitable properties for the targeted delivery of bioactive molecules. See also, Bioactive Polymers, US published application 20080267903, which discloses “Various polymers, including cationic polyamine polymers and dendrimeric polymers, are shown to possess anti-proliferative activity, and may therefore be useful for treatment of disorders characterised by undesirable cellular proliferation such as neoplasms and tumours, inflammatory disorders (including autoimmune disorders), psoriasis and atherosclerosis. The polymers may be used alone as active agents, or as delivery vehicles for other therapeutic agents, such as drug molecules or nucleic acids for gene therapy. In such cases, the polymers' own intrinsic anti-tumour activity may complement the activity of the agent to be delivered.” The disclosures of these patent publications may be employed in conjunction with herein teachings for delivery of nucleic acid-targetingsystem(s) or component(s) thereof or nucleic acid molecule(s) coding therefor.

### Supercharged Proteins

[1177] Supercharged proteins are a class of engineered or naturally occurring proteins with unusually high positive or negative net theoretical charge and may be employed in delivery of nucleic acid-targetingsystem(s) or component(s) thereof or nucleic acid molecule(s) coding therefor. Both supernegatively and superpositively charged proteins exhibit a remarkable ability to withstand thermally or chemically induced aggregation. Superpositively charged proteins are also able to penetrate mammalian cells. Associating cargo with these proteins, such as plasmid DNA, RNA, or other proteins, can enable the functional delivery of these macromolecules into mammalian cells both in vitro and in vivo. David Liu's lab reported the creation and characterization of supercharged proteins in 2007 (Lawrence et al., 2007, Journal of the American Chemical Society 129, 10110-10112).

[1178] The nonviral delivery of RNA and plasmid DNA into mammalian cells are valuable both for research and therapeutic applications (Akinc et al., 2010, Nat. Biotech. 26, 561-569). Purified +36 GFP protein (or other superpositively charged protein) is mixed with RNAs in the appropriate serum-free media and allowed to complex prior addition to cells. Inclusion of serum at this stage inhibits formation of the supercharged protein-RNA complexes and reduces the effectiveness of the treatment. The following protocol has been found to be effective for a variety of cell lines (McNaughton et al., 2009, Proc. Natl. Acad. Sci. USA 106, 6111-6116). However, pilot experiments varying the dose of protein and RNA should be performed to optimize the procedure for specific cell lines. (1) One day before treatment, plate 1×10⁵ cells per well in a 48-well plate. (2) On the day of treatment, dilute purified +36 GFP protein in serumfree media to a final concentration 200 nM. Add RNA to a final concentration of 50 nM. Vortex to mix and incubate at room temperature for 10 min. (3) During incubation, aspirate media from cells and wash once with PBS. (4) Following incubation of +36 GFP and RNA, add the protein-RNA complexes to cells. (5) Incubate cells with complexes at 37° C. for 4h. (6) Following incubation, aspirate the media and wash three times with 20 U/mL heparin PBS. Incubate cells with serum-containing media for a further 48h or longer depending upon the assay for activity. (7) Analyze cells by immunoblot, qPCR, phenotypic assay, or other appropriate method.

[1179] +36 GFP was found to be an effective plasmid delivery reagent in a range of cells. See also, e.g., McNaughton et al., Proc. Natl. Acad. Sci. USA 106, 6111-6116 (2009); Cronican et al., ACS Chemical Biology 5, 747-752 (2010); Cronican et al., Chemistry & Biology 18, 833-838 (2011); Thompson et al., Methods in Enzymology 503, 293-319 (2012); Thompson, D. B., et al., Chemistry & Biology 19 (7), 831-843 (2012). The methods of the super charged proteins may be used and/or adapted for delivery of the RNA-targeting system(s) or component(s) thereof or nucleic acid molecule(s) coding therefor of the invention.

### Cell Penetrating Peptides (CPPS)

[1180] In yet another embodiment, cell penetrating peptides (CPPs) are contemplated for the delivery of the CRISPR Cas system. CPPs are short peptides that facilitate cellular uptake of various molecular cargo (from nanosize particles to small chemical molecules and large fragments of DNA). The term “cargo” as used herein includes but is not limited to the group consisting of therapeutic agents, diagnostic probes, peptides, nucleic acids, antisense oligonucleotides, plasmids, proteins, particles including nanoparticles, liposomes, chromophores, small molecules and radioactive materials. In aspects of the invention, the cargo may also comprise any component of the CRISPR Cas system or the entire functional CRISPR Cas system. Aspects of the present invention further provide methods for delivering a desired cargo into a subject comprising: (a) preparing a complex comprising the cell penetrating peptide of the present invention and a desired cargo, and (b) orally, intraarticularly, intraperitoneally, intrathecally, intraarterially, intranasally, intraparenchymal, subcutaneously, intramuscularly, intravenously, dermally, intrarectally, or topically administering the complex to a subject. The cargo is associated with the peptides either through chemical linkage via covalent bonds or through non-covalent interactions. The function of the CPPs are to deliver the cargo into cells, a process that commonly occurs through endocytosis with the cargo delivered to the endosomes of living mammalian cells. Cell-penetrating peptides are of different sizes, amino acid sequences, and charges but all CPPs have one distinct characteristic, which is the ability to translocate the plasma membrane and facilitate the delivery of various molecular cargoes to the cytoplasm or an organelle. CPP translocation may be classified into three main entry mechanisms: direct penetration in the membrane, endocytosis-mediated entry, and translocation through the formation of a transitory structure. CPPs have found numerous applications in medicine as drug delivery agents in the treatment of different diseases including cancer and virus inhibitors, as well as contrast agents for cell labeling. Examples of the latter include acting as a carrier for GFP, MRI contrast agents, or quantum dots. CPPs hold great potential as in vitro and in vivo delivery vectors for use in research and medicine. CPPs typically have an amino acid composition that either contains a high relative abundance of positively charged amino acids such as lysine or arginine or has sequences that contain an alternating pattern of polar/charged amino acids and non-polar, hydrophobic amino acids. These two types of structures are referred to as polycationic or amphipathic, respectively. A third class of CPPs are the hydrophobic peptides, containing only apolar residues, with low net charge or have hydrophobic amino acid groups that are crucial for cellular uptake. One of the initial CPPs discovered was the trans-activating transcriptional activator (Tat) from Human Immunodeficiency Virus 1 (HIV-1) which was found to be efficiently taken up from the surrounding media by numerous cell types in culture. Since then, the number of known CPPs has expanded considerably and small molecule synthetic analogues with more effective protein transduction properties have been generated. CPPs include but are not limited to Penetratin, Tat (48-60), Transportan, and (R-AhX-R4) (Ahx=aminohexanoyl).

[1181] U.S. Pat. No. 8,372,951, provides a CPP derived from eosinophil cationic protein (ECP) which exhibits highly cell-penetrating efficiency and low toxicity. Aspects of delivering the CPP with its cargo into a vertebrate subject are also provided. Further aspects of CPPs and their delivery are described in U.S. Pat. Nos. 8,575,305; 8,614,194 and 8,044,019. CPPs can be used to deliver the CRISPR-Cas system or components thereof. That CPPs can be employed to deliver the CRISPR-Cas system or components thereof is also provided in the manuscript “Gene disruption by cell-penetrating peptide-mediated delivery of Cas9 protein and guide RNA”, by Suresh Ramakrishna, Abu-Bonsrah Kwaku Dad, Jagadish Beloor, et al. Genome Res. 2014 Apr. 2. [Epub ahead of print], incorporated by reference in its entirety, wherein it is demonstrated that treatment with CPP-conjugated recombinant Cas9 protein and CPP-complexed guide RNAs lead to endogenous gene disruptions in human cell lines. In the paper the Cas9 protein was conjugated to CPP via a thioether bond, whereas the guide RNA was complexed with CPP, forming condensed, positively charged particles. It was shown that simultaneous and sequential treatment of human cells, including embryonic stem cells, dermal fibroblasts, HEK293T cells, HeLa cells, and embryonic carcinoma cells, with the modified Cas9 and guide RNA led to efficient gene disruptions with reduced off-target mutations relative to plasmid transfections. CPP delivery can be used in the practice of the invention.

### Implantable Devices

[1182] In another embodiment, implantable devices are also contemplated for delivery of the RNA-targeting system or component(s) thereof or nucleic acid molecule(s) coding therefor. For example, US Patent Publication 20110195123 discloses an implantable medical device which elutes a drug locally and in prolonged period is provided, including several types of such a device, the treatment modes of implementation and methods of implantation. The device comprising of polymeric substrate, such as a matrix for example, that is used as the device body, and drugs, and in some cases additional scaffolding materials, such as metals or additional polymers, and materials to enhance visibility and imaging. An implantable delivery device can be advantageous in providing release locally and over a prolonged period, where drug is released directly to the extracellular matrix (ECM) of the diseased area such as tumor, inflammation, degeneration or for symptomatic objectives, or to injured smooth muscle cells, or for prevention. One kind of drug is RNA, as disclosed above, and this system may be used/ and or adapted to the nucleic acid-targeting system of the present invention. The modes of implantation in some embodiments are existing implantation procedures that are developed and used today for other treatments, including brachytherapy and needle biopsy. In such cases the dimensions of the new implant described in this invention are similar to the original implant. Typically a few devices are implanted during the same treatment procedure. US Patent Publication 20110195123, provides a drug delivery implantable or insertable system, including systems applicable to a cavity such as the abdominal cavity and/or any other type of administration in which the drug delivery system is not anchored or attached, comprising a biostable and/or degradable and/or bioabsorbable polymeric substrate, which may for example optionally be a matrix. It should be noted that the term “insertion” also includes implantation. The drug delivery system is preferably implemented as a “Loder” as described in US Patent Publication 20110195123. The polymer or plurality of polymers are biocompatible, incorporating an agent and/or plurality of agents, enabling the release of agent at a controlled rate, wherein the total volume of the polymeric substrate, such as a matrix for example, in some embodiments is optionally and preferably no greater than a maximum volume that permits a therapeutic level of the agent to be reached. As a non-limiting example, such a volume is preferably within the range of 0.1 m³ to 1000 mm³, as required by the volume for the agent load. The Loder may optionally be larger, for example when incorporated with a device whose size is determined by functionality, for example and without limitation, a knee joint, an intra-uterine or cervical ring and the like. The drug delivery system (for delivering the composition) is designed in some embodiments to preferably employ degradable polymers, wherein the main release mechanism is bulk erosion; or in some embodiments, non-degradable, or slowly degraded polymers are used, wherein the main release mechanism is diffusion rather than bulk erosion, so that the outer part functions as membrane, and its internal part functions as a drug reservoir, which practically is not affected by the surroundings for an extended period (for example from about a week to about a few months). Combinations of different polymers with different release mechanisms may also optionally be used. The concentration gradient at the surface is preferably maintained effectively constant during a significant period of the total drug releasing period, and therefore the diffusion rate is effectively constant (termed “zero mode” diffusion). By the term “constant” it is meant a diffusion rate that is preferably maintained above the lower threshold of therapeutic effectiveness, but which may still optionally feature an initial burst and/or may fluctuate, for example increasing and decreasing to a certain degree. The diffusion rate is preferably so maintained for a prolonged period, and it can be considered constant to a certain level to optimize the therapeutically effective period, for example the effective silencing period. The drug delivery system optionally and preferably is designed to shield the nucleotide based therapeutic agent from degradation, whether chemical in nature or due to attack from enzymes and other factors in the body of the subject. The drug delivery system of US Patent Publication 20110195123 is optionally associated with sensing and/or activation appliances that are operated at and/or after implantation of the device, by non and/or minimally invasive methods of activation and/or acceleration/deceleration, for example optionally including but not limited to thermal heating and cooling, laser beams, and ultrasonic, including focused ultrasound and/or RF (radiofrequency) methods or devices. According to some embodiments of US Patent Publication 20110195123, the site for local delivery may optionally include target sites characterized by high abnormal proliferation of cells, and suppressed apoptosis, including tumors, active and or chronic inflammation and infection including autoimmune diseases states, degenerating tissue including muscle and nervous tissue, chronic pain, degenerative sites, and location of bone fractures and other wound locations for enhancement of regeneration of tissue, and injured cardiac, smooth and striated muscle. The site for implantation of the composition, or target site, preferably features a radius, area and/or volume that is sufficiently small for targeted local delivery. For example, the target site optionally has a diameter in a range of from about 0.1 mm to about 5 cm. The location of the target site is preferably selected for maximum therapeutic efficacy. For example, the composition of the drug delivery system (optionally with a device for implantation as described above) is optionally and preferably implanted within or in the proximity of a tumor environment, or the blood supply associated thereof. For example the composition (optionally with the device) is optionally implanted within or in the proximity to pancreas, prostate, breast, liver, via the nipple, within the vascular system and so forth. The target location is optionally selected from the group comprising, consisting essentially of, or consisting of (as non-limiting examples only, as optionally any site within the body may be suitable for implanting a Loder): 1. brain at degenerative sites like in Parkinson or Alzheimer disease at the basal ganglia, white and gray matter; 2. spine as in the case of amyotrophic lateral sclerosis (ALS); 3. uterine cervix to prevent HPV infection; 4. active and chronic inflammatory joints; 5. dermis as in the case of psoriasis; 6. sympathetic and sensoric nervous sites for analgesic effect; 7. Intra osseous implantation; 8. acute and chronic infection sites; 9. Intra vaginal; 10. Inner ear-auditory system, labyrinth of the inner ear, vestibular system; 11. Intra tracheal; 12. Intra-cardiac; coronary, epicardiac; 13. urinary bladder; 14. biliary system; 15. parenchymal tissue including and not limited to the kidney, liver, spleen; 16. lymph nodes; 17. salivary glands; 18. dental gums; 19. Intra-articular (into joints); 20. Intra-ocular; 21. Brain tissue; 22. Brain ventricles; 23. Cavities, including abdominal cavity (for example but without limitation, for ovary cancer); 24. Intra esophageal and 25. Intra rectal.

[1183] Optionally insertion of the system (for example a device containing the composition) is associated with injection of material to the ECM at the target site and the vicinity of that site to affect local pH and/or temperature and/or other biological factors affecting the diffusion of the drug and/or drug kinetics in the ECM, of the target site and the vicinity of such a site. Optionally, according to some embodiments, the release of said agent could be associated with sensing and/or activation appliances that are operated prior and/or at and/or after insertion, by non and/or minimally invasive and/or else methods of activation and/or acceleration/deceleration, including laser beam, radiation, thermal heating and cooling, and ultrasonic, including focused ultrasound and/or RF (radiofrequency) methods or devices, and chemical activators.

[1184] According to embodiments of US Patent Publication 20110195123 that can be used in the practice of the invention, the drug preferably comprises a RNA, for example for localized cancer cases in breast, pancreas, brain, kidney, bladder, lung, and prostate as described below. Although exemplified with RNAi, many drugs are applicable to be encapsulated in Loder, and can be used in association with this invention, as long as such drugs can be encapsulated with the Loder substrate, such as a matrix for example, and this system may be used and/or adapted to deliver the nucleic acid-targeting system of the present invention. As another example of a specific application, neuro and muscular degenerative diseases develop due to abnormal gene expression. Local delivery of RNAs may have therapeutic properties for interfering with such abnormal gene expression. Local delivery of anti-apoptotic, anti-inflammatory and anti-degenerative drugs including small drugs and macromolecules may also optionally be therapeutic. In such cases the Loder is applied for prolonged release at constant rate and/or through a dedicated device that is implanted separately.

[1185] All of this may be used and/or adapted to the RNA-targeting system of the present invention. Implantable device technology herein discussed can be employed with herein teachings and hence by this disclosure and the knowledge in the art, CRISPR-Cas13 system or complex or components thereof or nucleic acid molecules thereof or encoding or providing components may be delivered via an implantable device.

### Polymer-Based Particles

[1186] The systems and compositions herein may be delivered using polymer-based particles (e.g., nanoparticles). In some embodiments, the polymer-based particles may mimic a viral mechanism of membrane fusion. The polymer-based particles may be a synthetic copy of Influenza virus machinery and form transfection complexes with various types of nucleic acids ((siRNA, miRNA, plasmid DNA or shRNA, mRNA) that cells take up via the endocytosis pathway, a process that involves the formation of an acidic compartment. The low pH in late endosomes acts as a chemical switch that renders the particle surface hydrophobic and facilitates membrane crossing. Once into the cytosol, the particle releases its payload for cellular action. This Active Endosome Escape technology is safe and maximizes transfection efficiency as it is using a natural uptake pathway. In some embodiments, the polymer-based particles may comprise alkylated and carboxyalkylated branched polyethylenimine. In some examples, the polymer-based particles are VIROMER, e.g., VIROMER RNAi, VIROMER RED, VIROMER mRNA, VIROMER CRISPR. Example methods of delivering the systems and compositions herein include those described in Bawage S S et al., Synthetic mRNA expressed Cas13a mitigates RNA virus infections, www.biorxiv.org/content/10. 1101/370460v1. full doi: doi.org/10. 1101/370460, Viromer® RED, a powerful tool for transfection of keratinocytes. doi: 10.13140/RG.2.2.16993.61281, Viromer® Transfection—Factbook 2018: technology, product overview, users' data., doi:10.13140/RG.2.2.23912.16642.

### Vectors

[1187] In certain aspects the invention involves vectors, e.g. for delivering or introducing in a cell CRISPR-Cas and/or RNA capable of guiding CRISPR-Cas to a target locus (i.e. guide RNA), but also for propagating these components (e.g. in prokaryotic cells). A used herein, a “vector” is a tool that allows or facilitates the transfer of an entity from one environment to another. It is a replicon, such as a plasmid, phage, or cosmid, into which another DNA segment may be inserted so as to bring about the replication of the inserted segment. Generally, a vector is capable of replication when associated with the proper control elements. In general, the term “vector” refers to a nucleic acid molecule capable of transporting another nucleic acid to which it has been linked. Vectors include, but are not limited to, nucleic acid molecules that are single-stranded, double-stranded, or partially double-stranded; nucleic acid molecules that comprise one or more free ends, no free ends (e.g. circular); nucleic acid molecules that comprise DNA, RNA, or both; and other varieties of polynucleotides known in the art. One type of vector is a “plasmid,” which refers to a circular double stranded DNA loop into which additional DNA segments can be inserted, such as by standard molecular cloning techniques. Another type of vector is a viral vector, wherein virally-derived DNA or RNA sequences are present in the vector for packaging into a virus (e.g. retroviruses, replication defective retroviruses, adenoviruses, replication defective adenoviruses, and adeno-associated viruses (AAVs)). Viral vectors also include polynucleotides carried by a virus for transfection into a host cell. Certain vectors are capable of autonomous replication in a host cell into which they are introduced (e.g. bacterial vectors having a bacterial origin of replication and episomal mammalian vectors). Other vectors (e.g., non-episomal mammalian vectors) are integrated into the genome of a host cell upon introduction into the host cell, and thereby are replicated along with the host genome. Moreover, certain vectors are capable of directing the expression of genes to which they are operatively-linked. Such vectors are referred to herein as “expression vectors.” Common expression vectors of utility in recombinant DNA techniques are often in the form of plasmids.

[1188] Recombinant expression vectors can comprise a nucleic acid of the invention in a form suitable for expression of the nucleic acid in a host cell, which means that the recombinant expression vectors include one or more regulatory elements, which may be selected on the basis of the host cells to be used for expression, that is operatively-linked to the nucleic acid sequence to be expressed. Within a recombinant expression vector, “operably linked” is intended to mean that the nucleotide sequence of interest is linked to the regulatory element(s) in a manner that allows for expression of the nucleotide sequence (e.g. in an in vitro transcription/translation system or in a host cell when the vector is introduced into the host cell). With regards to recombination and cloning methods, mention is made of U.S. patent application Ser. No. 10/815,730, published Sep. 2, 2004 as US 2004-0171156 A1, the contents of which are herein incorporated by reference in their entirety.

[1189] The vector(s) can include the regulatory element(s), e.g., promoter(s). The vector(s) can comprise CRISPR-Cas encoding sequence(s), and/or a single, but possibly also can comprise at least 2, 3 or 8 or 16 or 32 or 48 or 50 guide RNA(s) (e.g., crRNAs) encoding sequences, such as 1-2, 1-3, 1-4 1-5, 3-6, 3-7, 3-8, 3-9, 3-10, 3-8, 3-16, 3-30, 3-32, 3-48, 3-50 RNA(s) (e.g., crRNAs). In a single vector there can be a promoter for each RNA (e.g., crRNA(s)), advantageously when there are up to about 16 RNA(s) (e.g., crRNA(s)s); and, when a single vector provides for more than 16 RNA(s) (e.g., crRNA(s)s), one or more promoter(s) can drive expression of more than one of the RNA(s) (e.g., crRNA(s)s), e.g., when there are 32 RNA(s) (e.g., sgRNAs or crRNA(s)), each promoter can drive expression of two RNA(s) (e.g., sgRNAs or crRNA(s)), and when there are 48 RNA(s) (e.g., sgRNAs or crRNA(s)), each promoter can drive expression of three RNA(s) (e.g., sgRNAs or crRNA(s)). By simple arithmetic and well established cloning protocols and the teachings in this disclosure one skilled in the art can readily practice the invention as to the RNA(s), e.g., sgRNA(s) or crRNA(s) for a suitable exemplary vector such as AAV, and a suitable promoter such as the U6 promoter, e.g., U6-sgRNAs or -crRNA(s). For example, the packaging limit of AAV is ˜4.7 kb. The skilled person can readily fit about 12-16, e.g., 13 U6-sgRNA or crRNA(s) cassettes in a single vector. This can be assembled by any suitable means, such as a golden gate strategy used for TALE assembly (www.genome-engineering.org/taleffectors/). The skilled person can also use a tandem guide strategy to increase the number of U6-sgRNAs or -crRNA(s) by approximately 1.5 times, e.g., to increase from 12-16, e.g., 13 to approximately 18-24, e.g., about 19 U6-sgRNAs or -crRNA(s). Therefore, one skilled in the art can readily reach approximately 18-24, e.g., about 19 promoter-RNAs, e.g., U6-sgRNAs or -crRNA(s) in a single vector, e.g., an AAV vector. A further means for increasing the number of promoters and RNAs, e.g., sgRNA(s) or crRNA(s) in a vector is to use a single promoter (e.g., U6) to express an array of RNAs, e.g., sgRNAs or crRNA(s) separated by cleavable sequences. And an even further means for increasing the number of promoter-RNAs, e.g., sgRNAs or crRNA(s) in a vector, is to express an array of promoter-RNAs, e.g., sgRNAs or crRNA(s) separated by cleavable sequences in the intron of a coding sequence or gene; and, in this instance it is advantageous to use a polymerase II promoter, which can have increased expression and enable the transcription of long RNA in a tissue specific manner. (see, e.g., nar.oxfordjournals.org/content/34/7/e53.short, www.nature com/mt/journal/v16/n⁹/abs/mt2008144a.html). In an advantageous embodiment, AAV may package U6 tandem sgRNA targeting up to about 50 genes. Accordingly, from the knowledge in the art and the teachings in this disclosure the skilled person can readily make and use vector(s), e.g., a single vector, expressing multiple RNAs or guides or sgRNAs or crRNA(s) under the control or operatively or functionally linked to one or more promoters—especially as to the numbers of RNAs or guides or sgRNAs or crRNA(s) discussed herein, without any undue experimentation.

### Kits

[1190] In one aspect, the invention provides kits containing any one or more of the elements disclosed in the above methods and compositions. In some embodiments, the kit comprises a vector system as taught herein or one or more of the components of the CRISPR/Cas system or complex as taught herein, such as crRNAs and/or CRISPR-Cas effector protein or CRISPR-Cas effector protein encoding mRNA, and instructions for using the kit. Elements may be provide individually or in combinations, and may be provided in any suitable container, such as a vial, a bottle, or a tube. In some embodiments, the kit includes instructions in one or more languages, for example in more than one language. The instructions may be specific to the applications and methods described herein. In some embodiments, a kit comprises one or more reagents for use in a process utilizing one or more of the elements described herein. Reagents may be provided in any suitable container. For example, a kit may provide one or more reaction or storage buffers. Reagents may be provided in a form that is usable in a particular assay, or in a form that requires addition of one or more other components before use (e.g., in concentrate or lyophilized form). A buffer can be any buffer, including but not limited to a sodium carbonate buffer, a sodium bicarbonate buffer, a borate buffer, a Tris buffer, a MOPS buffer, a HEPES buffer, and combinations thereof. In some embodiments, the buffer is alkaline. In some embodiments, the buffer has a pH from about 7 to about 10. In some embodiments, the kit comprises one or more oligonucleotides corresponding to a guide sequence for insertion into a vector so as to operably link the guide or crRNA sequence and a regulatory element. In some embodiments, the kit comprises a homologous recombination template polynucleotide. In some embodiments, the kit comprises one or more of the vectors and/or one or more of the polynucleotides described herein. The kit may advantageously allow to provide all elements of the systems of the invention.

[1191] The present application also provides aspects and embodiments as set forth in the following numbered Statements:

1. An engineered CRISPR-Cas protein comprising one or more HEPN domains and further comprising one or more modified amino acids, wherein the amino acids: a) interact with a guide RNA that forms a complex with the engineered CRISPR-Cas protein; b) are in a HEPN active site, an inter-domain linker domain, a lid domain, a helical domain 1, a helical domain 2, or a bridge helix domain of the engineered CRISPR-Cas protein; or c) a combination thereof.
2. The engineered CRISPR-Cas protein of statement 1, wherein the HEPN domain comprises a RxxxxH motif.
3. The engineered CRISPR-Cas protein of statement 1 or 2, wherein the RxxxxH motif comprises a R{N/H/K}X₁X₂X₃H sequence.
4. The engineered CRISPR-Cas protein of any one of preceding statements, wherein: X₁ is R, S, D, E, Q, N, G, or Y; X₂ is independently I, S, T, V, or L; and X₃ is independently L, F, N, Y, V, I, S, D, E, or A.
5. The engineered CRISPR-Cas protein of any one of preceding statements, wherein the CRISPR-Cas protein is a Type VI CRISPR-Cas protein.
6. The engineered CRISPR-Cas protein of any one of preceding statements, wherein the Type VI CRISPR-Cas protein is Cas13.
7. The engineered CRISPR-Cas protein of any one of preceding statements, wherein the Type VI CRISPR-Cas protein is Cas13a, Cas13b, Cas13c, or Cas13d.
8. The engineered CRISPR-Cas protein of any one of preceding statements, comprising one or more mutation of an amino acid corresponding to the following amino acids of Prevotella buccae Cas13b (PbCas13b): T405, H407, K457, H500, K570, K590, N634, R638, N652, N653, K655, S658, K741, K744, N756, S757, R762, R791, K846, K857, K870, R877, K183, K193, R600, K607, K612, R614, K617, K826, K828, K829, R824, R830, Q831, K835, K836, R838, R618, D434, K431, R53, K943, R1041, Y164, R285, R287, K292, E296, N297, Q646, N647, R402, K393, N653, N652, R482, N480, D396, E397, D398, E399, K294, E400, R56, N157, H161, H452, N455, K484, N486, G566, H567, A656, V795, A796, W842, K871, E873, R874, R1068, N1069, or H1073.
9. The engineered CRISPR-Cas protein of any one of preceding statements, comprising one or more mutation of an amino acid corresponding to the following amino acids of Prevotella buccae Cas13b (PbCas13b): H407, K457, H500, K570, K590, N634, R638, N652, N653, K655, S658, K741, K744, N756, S757, R762, R791, K846, K857, K870, R877, K183, K193, R600, K607, K612, R614, K617, K826, K828, K829, R824, R830, Q831, K835, K836, R838, R618, D434, K431, R53, K943, R1041, Y164, R285, R287, K292, E296, N297, Q646, N647, R402, K393, N653, N652, R482, N480, D396, E397, D398, E399, K294, E400, R56, N157, H161, H452, N455, K484, N486, G566, H567, W842, K871, E873, R874, R1068, N1069, or H1073.
10. The engineered CRISPR-Cas protein of any one of preceding statements comprising one or more mutation of an amino acid corresponding to the following amino acids of Prevotella buccae Cas13b (PbCas13b): T405, H407, K457, H500, K570, K590, N634, R638, N652, N653, K655, S658, K741, K744, N756, S757, R762, R791, K846, K857, K870, R877, K183, K193, R600, K607, K612, R614, K617, K826, K828, K829, R824, R830, Q831, K835, K836, R838, R618, D434, K431, R53, K943, R1041, Y164, R285, R287, K292, E296, N297, Q646, N647, R402, K393, N653, N652, R482, N480, D396, E397, D398, E399, K294, or E400.
11. The engineered CRISPR-Cas protein of any one of preceding statements comprising one or more mutation of an amino acid corresponding to the following amino acids of Prevotella buccae Cas13b (PbCas13b): K393, R402, N482, T405, H407, S658, N653, A656, K655, N652, H567, N455, H500, K871, K857, K870, W842, E873, R877, K846, R874, R762, V795, A796, R791, G566, K590, R638, H452, S757, N756, N486, K484, N480, K457, K741, R56, N157, H161, R1068, N1069, or H1073.
12. The engineered CRISPR-Cas protein of any one of preceding statements comprising one or more mutation of an amino acid corresponding to the following amino acids of PbCas13b: K393, R402, N482, H407, S658, N653, K655, N652, H567, N455, H500, K871, K857, K870, W842, E873, R877, K846, R874, R762, R791, G566, K590, R638, H452, S757, N756, N486, K484, N480, K457, K741, R56, N157, H161, R1068, N1069, or H1073.
13. The engineered CRISPR-Cas protein of any one of preceding statements comprising one or more mutation of an amino acid corresponding to the following amino acids of PbCas13b: W842, K846, K870, E873, or R877.
14. The engineered CRISPR-Cas protein of any one of preceding statements comprising in helical domain 1 one or more mutation of an amino acid corresponding to the following amino acids in helical domain 1 of PbCas13b: W842, K846, K870, E873, or R877.
15. The engineered CRISPR-Cas protein of any one of preceding statements comprising in helical domain 1-3 one or more mutation of an amino acid corresponding to the following amino acids in helical domain 1-3 of PbCas13b: W842, K846, K870, E873, or R877.
16. The engineered CRISPR-Cas protein of any one of preceding statements comprising in the bridge helix domain one or more mutation of an amino acid corresponding to the following amino acids in the bridge helix domain of PbCas13b: W842, K846, K870, E873, or R877.
17. The engineered CRISPR-Cas protein of any one of preceding statements comprising one or more mutation of an amino acid corresponding to the following amino acids of PbCas13b: K393, R402, N480, N482, N652, or N653.
18. The engineered CRISPR-Cas protein of any one of preceding statements comprising one or more mutation of an amino acid corresponding to the following amino acids of PbCas13b: K393, R402, N480, or N482.
19. The engineered CRISPR-Cas protein of any one of preceding statements comprising in the LID domain one or more mutation of an amino acid corresponding to the following amino acids in the LID domain of PbCas13b: K393, R402, N480, or N482.
20. The engineered CRISPR-Cas protein of any one of preceding statements comprising one or more mutation of an amino acid corresponding to the following amino acids of PbCas13b: N652 or N653.
21. The engineered CRISPR-Cas protein of any one of preceding statements comprising in helical domain 2 one or more mutation of an amino acid corresponding to the following amino acids in helical domain 2 of PbCas13b: N652 or N653.
22. The engineered CRISPR-Cas protein of any one of preceding statements comprising one or more mutation of an amino acid corresponding to the following amino acids of PbCas13b: T405, H407, S658, N653, A656, K655, N652, H567, N455, H500, K871, K857, K870, W842, E873, R877, K846, R874, R762, V795, A796, R791, G566, K590, R638, H452, S757, N756, N486, K484, N480, K457, or K741.
23. The engineered CRISPR-Cas protein of any one of preceding statements comprising one or more mutation of an amino acid corresponding to the following amino acids of PbCas13b: H407, S658, N653, K655, N652, H567, N455, H500, K871, K857, K870, W842, E873, R877, K846, R874, R762, R791, G566, K590, R638, H452, S757, N756, N486, K484, N480, K457, or K741.
24. The engineered CRISPR-Cas protein of any one of preceding statements comprising one or more mutation of an amino acid corresponding to the following amino acids of PbCas13b: S658, N653, A656, K655, N652, H567, H500, K871, K857, K870, W842, E873, R877, K846, R874, R762, V795, A796, R791, G566, K590, R638, S757, N756, or K741.
25. The engineered CRISPR-Cas protein of any one of preceding statements comprising in a helical domain one or more mutation of an amino acid corresponding to the following amino acids in a helical domain of PbCas13b: S658, N653, A656, K655, N652, H567, H500, K871, K857, K870, W842, E873, R877, K846, R874, R762, V795, A796, R791, G566, K590, R638, S757, N756, or K741.
26. The engineered CRISPR-Cas protein of any one of preceding statements comprising one or more mutation of an amino acid corresponding to the following amino acids of PbCas13b: H567, H500, K871, K857, K870, W842, E873, R877, K846, R874, R762, V795, A796, R791, G566, S757, or N756.
27. The engineered CRISPR-Cas protein of any one of preceding statements comprising in helical domain 1 one or more mutation of an amino acid corresponding to the following amino acids in helical domain 1 of PbCas13b: H567, H500, K871, K857, K870, W842, E873, R877, K846, R874, R762, V795, A796, R791, G566, S757, or N756.
28. The engineered CRISPR-Cas protein of any one of preceding statements comprising one or more mutation of an amino acid corresponding to the following amino acids of PbCas13b: H567, H500, R762, V795, A796, R791, G566, S757, or N756.
29. The engineered CRISPR-Cas protein of any one of preceding statements comprising in helical domain 1 one or more mutation of an amino acid corresponding to the following amino acids in helical domain 1 of PbCas13b: H567, H500, R762, V795, A796, R791, G566, S757, or N756.
30. The engineered CRISPR-Cas protein of any one of preceding statements comprising one or more mutation of an amino acid corresponding to the following amino acids of PbCas13b: K871, K857, K870, W842, E873, R877, K846, or R874.
31. The engineered CRISPR-Cas protein of any one of preceding statements comprising in the bridge helix domain one or more mutation of an amino acid corresponding to the following amino acids in the bridge helix domain of PbCas13b: K871, K857, K870, W842, E873, R877, K846, or R874.
32. The engineered CRISPR-Cas protein of any one of preceding statements comprising one or more mutation of an amino acid corresponding to the following amino acids of PbCas13b: H567, H500, or G566.
33. The engineered CRISPR-Cas protein of any one of preceding statements comprising in helical domain 1-2 one or more mutation of an amino acid corresponding to the following amino acids in helical domain 1-2 of PbCas13b: H567, H500, or G566.
34. The engineered CRISPR-Cas protein of any one of preceding statements comprising one or more mutation of an amino acid corresponding to the following amino acids of PbCas13b: K871, K857, K870, W842, E873, R877, K846, R874, R762, V795, A796, R791, S757, or N756.
35. The engineered CRISPR-Cas protein of any one of preceding statements comprising in helical domain 1-3 one or more mutation of an amino acid corresponding to the following amino acids in helical domain 1-3 of PbCas13b: K871, K857, K870, W842, E873, R877, K846, R874, R762, V795, A796, R791, S757, or N756.
36. The engineered CRISPR-Cas protein of any one of preceding statements comprising one or more mutation of an amino acid corresponding to the following amino acids of PbCas13b: R762, V795, A796, R791, S757, or N756.
37. The engineered CRISPR-Cas protein of any one of preceding statements comprising in helical domain 1-3 one or more mutation of an amino acid corresponding to the following amino acids in helical domain 1-3 of PbCas13b: R762, V795, A796, R791, S757, or N756.
38. The engineered CRISPR-Cas protein of any one of preceding statements comprising one or more mutation of an amino acid corresponding to the following amino acids of PbCas13b: S658, N653, A656, K655, N652, K590, R638, or K741.
39. The engineered CRISPR-Cas protein of any one of preceding statements comprising in helical domain 2 one or more mutation of an amino acid corresponding to the following amino acids in helical domain 2 of PbCas13b: S658, N653, A656, K655, N652, K590, R638, or K741.
40. The engineered CRISPR-Cas protein of any one of preceding statements comprising one or more mutation of an amino acid corresponding to the following amino acids of PbCas13b: T405, H407, N486, K484, N480, H452, N455, or K457.
41. The engineered CRISPR-Cas protein of any one of preceding statements comprising in the LID domain one or more mutation of an amino acid corresponding to the following amino acids in the LID domain of PbCas13b: T405, H407, N486, K484, N480, H452, N455, or K457.
42. The engineered CRISPR-Cas protein of any one of preceding statements comprising one or more mutation of an amino acid corresponding to the following amino acids of PbCas13b: S658, N653, K655, N652, H567, H500, K871, K857, K870, W842, E873, R877, K846, R874, R762, R791, G566, K590, R638, S757, N756, or K741.
43. The engineered CRISPR-Cas protein of any one of preceding statements comprising in a helical domain one or more mutation of an amino acid corresponding to the following amino acids in a helical domain of PbCas13b: S658, N653, K655, N652, H567, H500, K871, K857, K870, W842, E873, R877, K846, R874, R762, R791, G566, K590, R638, S757, N756, or K741.
44. The engineered CRISPR-Cas protein of any one of preceding statements comprising one or more mutation of an amino acid corresponding to the following amino acids of PbCas13b: H567, H500, K871, K857, K870, W842, E873, R877, K846, R874, R762, R791, G566, S757, or N756.
45. The engineered CRISPR-Cas protein of any one of preceding statements comprising in helical domain 1 one or more mutation of an amino acid corresponding to the following amino acids in helical domain 1 of PbCas13b: H567, H500, K871, K857, K870, W842, E873, R877, K846, R874, R762, R791, G566, S757, or N756.
46. The engineered CRISPR-Cas protein of any one of preceding statements comprising one or more mutation of an amino acid corresponding to the following amino acids of PbCas13b: H567, H500, R762, R791, G566, S757, or N756.
47. The engineered CRISPR-Cas protein of any one of preceding statements comprising in helical domain 1 one or more mutation of an amino acid corresponding to the following amino acids in helical domain 1 of PbCas13b: H567, H500, R762, R791, G566, S757, or N756.
48. The engineered CRISPR-Cas protein of any one of preceding statements comprising one or more mutation of an amino acid corresponding to the following amino acids of PbCas13b: K871, K857, K870, W842, E873, R877, K846, R874, R762, R791, S757, or N756.
49. The engineered CRISPR-Cas protein of any one of preceding statements comprising in helical domain 1-3 one or more mutation of an amino acid corresponding to the following amino acids in helical domain 1-3 of PbCas13b: K871, K857, K870, W842, E873, R877, K846, R874, R762, R791, S757, or N756.
50. The engineered CRISPR-Cas protein of any one of preceding statements comprising one or more mutation of an amino acid corresponding to the following amino acids of PbCas13b: R762, R791, S757, or N756.
51. The engineered CRISPR-Cas protein of any one of preceding statements comprising in helical domain 1-3 one or more mutation of an amino acid corresponding to the following amino acids in helical domain 1-3 of PbCas13b: R762, R791, S757, or N756.
52. The engineered CRISPR-Cas protein of any one of preceding statements comprising one or more mutation of an amino acid corresponding to the following amino acids of PbCas13b: S658, N653, K655, N652, K590, R638, or K741.
53. The engineered CRISPR-Cas protein of any one of preceding statements comprising in helical domain 2 one or more mutation of an amino acid corresponding to the following amino acids in helical domain 2 of PbCas13b: S658, N653, K655, N652, K590, R638, or K741.
54. The engineered CRISPR-Cas protein of any one of preceding statements comprising one or more mutation of an amino acid corresponding to the following amino acids of PbCas13b: H407, N486, K484, N480, H452, N455, or K457.
55. The engineered CRISPR-Cas protein of any one of preceding statements comprising in the LID domain one or more mutation of an amino acid corresponding to the following amino acids in the LID domain of PbCas13b: H407, N486, K484, N480, H452, N455, or K457.
56. The engineered CRISPR-Cas protein of any one of preceding statements comprising one or more mutation of an amino acid corresponding to the following amino acids of PbCas13b: R56, N157, H161, R1068, N1069, or H1073.
57. The engineered CRISPR-Cas protein of any one of preceding statements comprising in a HEPN domain one or more mutation of an amino acid corresponding to the following amino acids in a HEPN domain of PbCas13b: R56, N157, H161, R1068, N1069, or H1073.
58. The engineered CRISPR-Cas protein of any one of preceding statements comprising one or more mutation of an amino acid corresponding to the following amino acids of PbCas13b: R56, N157, or H161.
59. The engineered CRISPR-Cas protein of any one of preceding statements comprising in HEPN domain 1 one or more mutation of an amino acid corresponding to the following amino acids in HEPN domain 1 of PbCas13b: R56, N157, or H161.
60. The engineered CRISPR-Cas protein of any one of preceding statements comprising one or more mutation of an amino acid corresponding to the following amino acids of PbCas13b: R1068, N1069, or H1073.
61. The engineered CRISPR-Cas protein of any one of preceding statements comprising in HEPN domain 2 one or more mutation of an amino acid corresponding to the following amino acids in HEPN domain 2 of PbCas13b: R1068, N1069, or H1073.
62. The engineered CRISPR-Cas protein of any one of preceding statements comprising one or more mutation of an amino acid corresponding to the following amino acids of PbCas13b: K393, R402, N482, T405, H407, N486, K484, N480, H452, N455, or K457.
63. The engineered CRISPR-Cas protein of any one of preceding statements comprising in the LID domain one or more mutation of an amino acid corresponding to the following amino acids in the LID domain of PbCas13b: K393, R402, N482, T405, H407, N486, K484, N480, H452, N455, or K457.
64. The engineered CRISPR-Cas protein of any one of preceding statements comprising one or more mutation of an amino acid corresponding to the following amino acids of PbCas13b: K393, R402, N482, H407, N486, K484, N480, H452, N455, or K457.
65. The engineered CRISPR-Cas protein of any one of preceding statements comprising in the LID domain one or more mutation of an amino acid corresponding to the following amino acids in the LID domain of PbCas13b: K393, R402, N482, H407, N486, K484, N480, H452, N455, or K457.
66. The engineered CRISPR-Cas protein of any one of preceding statements comprising one or more mutation of an amino acid corresponding to the following amino acids of PbCas13b: T405, H407, S658, N653, A656, K655, N652, H567, N455, H500, K871, K857, K870, W842, E873, R877, K846, R874, R762, V795, A796, R791, G566, K590, R638, H452, S757, N756, N486, K484, N480, K457, K741, K393, R402, or N482.
67. The engineered CRISPR-Cas protein of any one of preceding statements comprising one or more mutation of an amino acid corresponding to the following amino acids of PbCas13b: H407, S658, N653, K655, N652, H567, N455, H500, K871, K857, K870, W842, E873, R877, K846, R874, R762, R791, G566, K590, R638, H452, S757, N756, N486, K484, N480, K457, K741, K393, R402, or N482.
68. The engineered CRISPR-Cas protein of any one of preceding statements comprising one or more mutation of an amino acid corresponding to the following amino acids of PbCas13b: S658, N653, A656, K655, N652, H567, N455, H500, K871, K857, K870, W842, E873, R877, K846, R874, R762, V795, A796, R791, G566, K590, R638, H452, S757, N756, N486, K484, N480, K457, or K741.
69. The engineered CRISPR-Cas protein of any one of preceding statements comprising one or more mutation of an amino acid corresponding to the following amino acids of PbCas13b: S658, N653, K655, N652, H567, N455, H500, K871, K857, K870, W842, E873, R877, K846, R874, R762, R791, G566, K590, R638, H452, S757, N756, N486, K484, N480, K457, or K741.
70. The engineered CRISPR-Cas protein of any one of preceding statements comprising one or more mutation of an amino acid corresponding to the following amino acids of PbCas13b: N486, K484, N480, H452, N455, or K457.
71. The engineered CRISPR-Cas protein of any one of preceding statements comprising in the LID domain one or more mutation of an amino acid corresponding to the following amino acids in the LID domain of PbCas13b: N486, K484, N480, H452, N455, or K457.
72. The engineered CRISPR-Cas protein of any one of preceding statements comprising one or more mutation of an amino acid corresponding to the following amino acids of PbCas13b: K393, R402, N482, N486, K484, N480, H452, N455, or K457.
73. The engineered CRISPR-Cas protein of any one of preceding statements comprising in the LID domain one or more mutation of an amino acid corresponding to the following amino acids in the LID domain of PbCas13b: K393, R402, N482, N486, K484, N480, H452, N455, or K457.
74. The engineered CRISPR-Cas protein of any one of preceding statements comprising one or more mutation of an amino acid corresponding to the following amino acids of PbCas13b: S658, N653, A656, K655, N652, H567, N455, H500, K871, K857, K870, W842, E873, R877, K846, R874, R762, V795, A796, R791, G566, K590, R638, H452, S757, N756, N486, K484, N480, K457, K741, K393, R402, or N482.
75. The engineered CRISPR-Cas protein of any one of preceding statements comprising one or more mutation of an amino acid corresponding to the following amino acids of PbCas13b: S658, N653, K655, N652, H567, N455, H500, K871, K857, K870, W842, E873, R877, K846, R874, R762, R791, G566, K590, R638, H452, S757, N756, N486, K484, N480, K457, K741, K393, R402, or N482.
76. The engineered CRISPR-Cas protein of any one of preceding statements comprising one or more mutation of an amino acid corresponding to the following amino acids of Prevotella buccae Cas13b (PbCas13b): R53, Y164, K943, or R1041.
77. The engineered CRISPR-Cas protein of any one of preceding statements comprising one or more mutation of an amino acid corresponding to the following amino acids of Prevotella buccae Cas13b (PbCas13b): R53 or Y164.
78. The engineered CRISPR-Cas protein of any one of preceding statements comprising one or more mutation of an amino acid corresponding to the following amino acids of Prevotella buccae Cas13b (PbCas13b): K943 or R1041.
79. The engineered CRISPR-Cas protein of any one of preceding statements comprising in a HEPN domain one or more mutation of an amino acid corresponding to the following amino acids in a HEPN domain of Prevotella buccae Cas13b (PbCas13b): R53, Y164, K943, or R1041.
80. The engineered CRISPR-Cas protein of any one of preceding statements comprising in HEPN domain 1 one or more mutation of an amino acid corresponding to the following amino acids in HEPN domain 1 of Prevotella buccae Cas13b (PbCas13b): R53 or Y164.
81. The engineered CRISPR-Cas protein of any one of preceding statements comprising in HEPN domain 2 one or more mutation of an amino acid corresponding to the following amino acids in HEPN domain 2 of Prevotella buccae Cas13b (PbCas13b): K943 or R1041.
82. The engineered CRISPR-Cas protein of any one of preceding statements comprising one or more mutation of an amino acid corresponding to the following amino acids of Prevotella buccae Cas13b (PbCas13b): R53, Y164, K943, R1041, R56, N157, H161, R1068, N1069, or H1073.
83. The engineered CRISPR-Cas protein of any one of preceding statements comprising one or more mutation of an amino acid corresponding to the following amino acids of Prevotella buccae Cas13b (PbCas13b): R53, Y164, R56, N157, or H161.
84. The engineered CRISPR-Cas protein of any one of preceding statements comprising one or more mutation of an amino acid corresponding to the following amino acids of Prevotella buccae Cas13b (PbCas13b): K943, R1041, R1068, N1069, or H1073.
85. The engineered CRISPR-Cas protein of any one of preceding statements comprising in a HEPN domain one or more mutation of an amino acid corresponding to the following amino acids in a HEPN domain of Prevotella buccae Cas13b (PbCas13b): R53, Y164, K943, R1041, R56, N157, H161, R1068, N1069, or H1073.
86. The engineered CRISPR-Cas protein of any one of preceding statements comprising in HEPN domain 1 one or more mutation of an amino acid corresponding to the following amino acids in HEPN domain 1 of Prevotella buccae Cas13b (PbCas13b): R53, Y164, R56, N157, or H161.
87. The engineered CRISPR-Cas protein of any one of preceding statements comprising in HEPN domain 2 one or more mutation of an amino acid corresponding to the following amino acids in HEPN domain 2 of Prevotella buccae Cas13b (PbCas13b): K943, R1041, R1068, N1069, or H1073.
88. The engineered CRISPR-Cas protein of any one of preceding statements comprising one or more mutation of an amino acid corresponding to the following amino acids of Prevotella buccae Cas13b (PbCas13b): R53, Y164, K183, K193, K943, or R1041.
89. The engineered CRISPR-Cas protein of any one of preceding statements comprising one or more mutation of an amino acid corresponding to the following amino acids of Prevotella buccae Cas13b (PbCas13b): R53, Y164, K183, or K193.
90. The engineered CRISPR-Cas protein of any one of preceding statements comprising one or more mutation of an amino acid corresponding to the following amino acids of Prevotella buccae Cas13b (PbCas13b): K943 or R1041.
91. The engineered CRISPR-Cas protein of any one of preceding statements comprising in a HEPN domain one or more mutation of an amino acid corresponding to the following amino acids in a HEPN domain of Prevotella buccae Cas13b (PbCas13b): R53, Y164, K183, K193, K943, or R1041.
92. The engineered CRISPR-Cas protein of any one of preceding statements comprising in HEPN domain 1 one or more mutation of an amino acid corresponding to the following amino acids in HEPN domain 1 of Prevotella buccae Cas13b (PbCas13b): R53, Y164, K183, or K193.
93. The engineered CRISPR-Cas protein of any one of preceding statements comprising in HEPN domain 2 one or more mutation of an amino acid corresponding to the following amino acids in HEPN domain 2 of Prevotella buccae Cas13b (PbCas13b): K943 or R1041.
94. The engineered CRISPR-Cas protein of any one of preceding statements comprising one or more mutation of an amino acid corresponding to the following amino acids of Prevotella buccae Cas13b (PbCas13b): R53, Y164, K183, K193, K943, R1041, R56, N157, H161, R1068, N1069, or H1073.
95. The engineered CRISPR-Cas protein of any one of preceding statements comprising one or more mutation of an amino acid corresponding to the following amino acids of Prevotella buccae Cas13b (PbCas13b): R53, Y164, K183, K193, R56, N157, or H161.
96. The engineered CRISPR-Cas protein of any one of preceding statements comprising one or more mutation of an amino acid corresponding to the following amino acids of Prevotella buccae Cas13b (PbCas13b): K943, R1041, R1068, N1069, or H1073.
97. The engineered CRISPR-Cas protein of any one of preceding statements comprising in a HEPN domain one or more mutation of an amino acid corresponding to the following amino acids in a HEPN domain of Prevotella buccae Cas13b (PbCas13b): R53, Y164, K183, K193, K943, R1041, R56, N157, H161, R1068, N1069, or H1073.
98. The engineered CRISPR-Cas protein of any one of preceding statements comprising in HEPN domain 1 one or more mutation of an amino acid corresponding to the following amino acids in HEPN domain 1 of Prevotella buccae Cas13b (PbCas13b): R53, Y164, K183, K193, R56, N157, or H161.
99. The engineered CRISPR-Cas protein of any one of preceding statements comprising in HEPN domain 2 one or more mutation of an amino acid corresponding to the following amino acids in HEPN domain 2 of Prevotella buccae Cas13b (PbCas13b): K943, R1041, R1068, N1069, or H1073.
100. The engineered CRISPR-Cas protein of any one of preceding statements comprising one or more mutation of an amino acid corresponding to the following amino acids of Prevotella buccae Cas13b (PbCas13b): K183 or K193.
101. The engineered CRISPR-Cas protein of any one of preceding statements comprising in HEPN domain 1 one or more mutation of an amino acid corresponding to the following amino acids in HEPN domain 1 of Prevotella buccae Cas13b (PbCas13b): K183 or K193.
102. The engineered CRISPR-Cas protein of any one of preceding statements comprising one or more mutation of an amino acid corresponding to the following amino acids of Prevotella buccae Cas13b (PbCas13b): R53, Y164, K943, or R1041.
103. The engineered CRISPR-Cas protein of any one of preceding statements comprising in a HEPN domain one or more mutation of an amino acid corresponding to the following amino acids in a HEPN domain of Prevotella buccae Cas13b (PbCas13b): R53, Y164, K943, or R1041.
104. The engineered CRISPR-Cas protein of any one of preceding statements comprising one or more mutation of an amino acid corresponding to the following amino acids of Prevotella buccae Cas13b (PbCas13b): R53, K943, or R1041; preferably R53A, R53K, R53D, or R53E; K943A, K943R, K943D, or K943E; or R1041A, R1041K, R1041D, or R1041E.
105. The engineered CRISPR-Cas protein of any one of preceding statements comprising in a HEPN domain one or more mutation of an amino acid corresponding to the following amino acids in a HEPN domain of Prevotella buccae Cas13b (PbCas13b): R53, K943, or R1041; preferably R53A, R53K, R53D, or R53E; K943A, K943R, K943D, or K943E; or R1041A, R1041K, R1041D, or R1041E.
106. The engineered CRISPR-Cas protein of any one of preceding statements comprising a mutation of an amino acid corresponding to amino acid Y164 of Prevotella buccae Cas13b (PbCas13b), preferably Y164A, Y164F, or Y164W.
107. The engineered CRISPR-Cas protein of any one of preceding statements comprising HEPN domain 1 a mutation of an amino acid corresponding to amino acid Y164 HEPN domain 1 of Prevotella buccae Cas13b (PbCas13b), preferably Y164A, Y164F, or Y164W.
108. The engineered CRISPR-Cas protein of any one of preceding statements comprising one or more mutation of an amino acid corresponding to the following amino acids of Prevotella buccae Cas13b (PbCas13b): T405, H407, K457, D434, K431, R402, K393, R482, N480, D396, E397, D398, or E399.
109. The engineered CRISPR-Cas protein of any one of preceding statements comprising in the LID domain one or more mutation of an amino acid corresponding to the following amino acids in the LID domain of Prevotella buccae Cas13b (PbCas13b): T405, H407, K457, D434, K431, R402, K393, R482, N480, D396, E397, D398, or E399.
110. The engineered CRISPR-Cas protein of any one of preceding statements comprising a mutation of an amino acid corresponding to amino acid H407 of Prevotella buccae Cas13b (PbCas13b), preferably H407Y, H407W, or H407F.
111. The engineered CRISPR-Cas protein of any one of preceding statements comprising one or more mutation of an amino acid corresponding to the following amino acids of Prevotella buccae Cas13b (PbCas13b): R402, K393, R482, N480, D396, E397, D398, or E399.
112. The engineered CRISPR-Cas protein of any one of preceding statements comprising in the LID domain one or more mutation of an amino acid corresponding to the following amino acids in the LID domain of Prevotella buccae Cas13b (PbCas13b): R402, K393, R482, N480, D396, E397, D398, or E399.
113. The engineered CRISPR-Cas protein of any one of preceding statements comprising one or more mutation of an amino acid corresponding to the following amino acids of Prevotella buccae Cas13b (PbCas13b): K457, D434, or K431.
114. The engineered CRISPR-Cas protein of any one of preceding statements comprising in the LID domain one or more mutation of an amino acid corresponding to the following amino acids in the LID domain of Prevotella buccae Cas13b (PbCas13b): K457, D434, or K431.
115. The engineered CRISPR-Cas protein of any one of preceding statements comprising one or more mutation of an amino acid corresponding to the following amino acids of Prevotella buccae Cas13b (PbCas13b): H500, K570, K590, N634, R638, N652, N653, K655, S658, K741, K744, N756, S757, R762, R791, K846, K857, K870, R877, R600, K607, K612, R614, K617, K826, K828, K829, R824, R830, Q831, K835, K836, R838, R618, Q646, N647, N653, or N652.
116. The engineered CRISPR-Cas protein of any one of preceding statements comprising in a helical domain one or more mutation of an amino acid corresponding to the following amino acids in a helical domain of Prevotella buccae Cas13b (PbCas13b): H500, K570, K590, N634, R638, N652, N653, K655, S658, K741, K744, N756, S757, R762, R791, K846, K857, K870, R877, R600, K607, K612, R614, K617, K826, K828, K829, R824, R830, Q831, K835, K836, R838, R618, Q646, N647, N653, or N652.
117. The engineered CRISPR-Cas protein of any one of preceding statements comprising one or more mutation of an amino acid corresponding to the following amino acids of Prevotella buccae Cas13b (PbCas13b): H500, K570, N756, S757, R762, R791, K846, K857, K870, R877, K826, K828, K829, R824, R830, Q831, K835, K836, or R838.
118. The engineered CRISPR-Cas protein of any one of preceding statements comprising in helical domain 1 one or more mutation of an amino acid corresponding to the following amino acids in helical domain 1 of Prevotella buccae Cas13b (PbCas13b): H500, K570, N756, S757, R762, R791, K846, K857, K870, R877, K826, K828, K829, R824, R830, Q831, K835, K836, or R838.
119. The engineered CRISPR-Cas protein of any one of preceding statements comprising one or more mutation of an amino acid corresponding to the following amino acids of Prevotella buccae Cas13b (PbCas13b): H500, K570, N756, S757, R762, or R791.
120. The engineered CRISPR-Cas protein of any one of preceding statements comprising in helical domain 1 one or more mutation of an amino acid corresponding to the following amino acids in helical domain 1 of Prevotella buccae Cas13b (PbCas13b): H500, K570, N756, S757, R762, or R791.
121. The engineered CRISPR-Cas protein of any one of preceding statements comprising one or more mutation of an amino acid corresponding to the following amino acids of Prevotella buccae Cas13b (PbCas13b): K846, K857, K870, R877, K826, K828, K829, R824, R830, Q831, K835, K836, or R838.
122. The engineered CRISPR-Cas protein of any one of preceding statements comprising in the bridge helix domain one or more mutation of an amino acid corresponding to the following amino acids in the bridge helix domain of Prevotella buccae Cas13b (PbCas13b): K846, K857, K870, R877, K826, K828, K829, R824, R830, Q831, K835, K836, or R838.
123. The engineered CRISPR-Cas protein of any one of preceding statements comprising one or more mutation of an amino acid corresponding to the following amino acids of Prevotella buccae Cas13b (PbCas13b): H500 or K570.
124. The engineered CRISPR-Cas protein of any one of preceding statements comprising in helical domain 1-2 one or more mutation of an amino acid corresponding to the following amino acids in helical domain 1-2 of Prevotella buccae Cas13b (PbCas13b): H500 or K570.
125. The engineered CRISPR-Cas protein of any one of preceding statements comprising one or more mutation of an amino acid corresponding to the following amino acids of Prevotella buccae Cas13b (PbCas13b): N756, S757, R762, R791, K846, K857, K870, R877, K826, K828, K829, R824, R830, Q831, K835, K836, or R838.
126. The engineered CRISPR-Cas protein of any one of preceding statements comprising in helical domain 1-3 one or more mutation of an amino acid corresponding to the following amino acids in helical domain 1-3 of Prevotella buccae Cas13b (PbCas13b): N756, S757, R762, R791, K846, K857, K870, R877, K826, K828, K829, R824, R830, Q831, K835, K836, or R838.
127. The engineered CRISPR-Cas protein of any one of preceding statements comprising one or more mutation of an amino acid corresponding to the following amino acids of Prevotella buccae Cas13b (PbCas13b): N756, S757, R762, or R791.
128. The engineered CRISPR-Cas protein of any one of preceding statements comprising in helical domain 1-3 one or more mutation of an amino acid corresponding to the following amino acids in helical domain 1-3 of Prevotella buccae Cas13b (PbCas13b): N756, S757, R762, or R791.
129. The engineered CRISPR-Cas protein of any one of preceding statements comprising one or more mutation of an amino acid corresponding to the following amino acids of Prevotella buccae Cas13b (PbCas13b): N756, S757, R762, R791, K846, K857, K870, or R877.
130. The engineered CRISPR-Cas protein of any one of preceding statements comprising in helical domain 1-3 one or more mutation of an amino acid corresponding to the following amino acids in helical domain 1-3 of Prevotella buccae Cas13b (PbCas13b): N756, S757, R762, R791, K846, K857, K870, or R877.
131. The engineered CRISPR-Cas protein of any one of preceding statements comprising one or more mutation of an amino acid corresponding to the following amino acids of Prevotella buccae Cas13b (PbCas13b): K826, K828, K829, R824, R830, Q831, K835, K836, or R838.
132. The engineered CRISPR-Cas protein of any one of preceding statements comprising in helical domain 1-3 one or more mutation of an amino acid corresponding to the following amino acids in helical domain 1-3 of Prevotella buccae Cas13b (PbCas13b): K826, K828, K829, R824, R830, Q831, K835, K836, or R838.
133. The engineered CRISPR-Cas protein of any one of preceding statements comprising one or more mutation of an amino acid corresponding to the following amino acids of Prevotella buccae Cas13b (PbCas13b): K590, N634, R638, N652, N653, K655, S658, K741, K744, R600, K607, K612, R614, K617, R618, Q646, N647, N653, or N652.
134. The engineered CRISPR-Cas protein of any one of preceding statements comprising in helical domain 2 one or more mutation of an amino acid corresponding to the following amino acids in helical domain 2 of Prevotella buccae Cas13b (PbCas13b): K590, N634, R638, N652, N653, K655, S658, K741, K744, R600, K607, K612, R614, K617, R618, Q646, N647, N653, or N652.
135. The engineered CRISPR-Cas protein of any one of preceding statements comprising one or more mutation of an amino acid corresponding to the following amino acids of Prevotella buccae Cas13b (PbCas13b): Q646 or N647.
136. The engineered CRISPR-Cas protein of any one of preceding statements comprising in helical domain 2 one or more mutation of an amino acid corresponding to the following amino acids in helical domain 2 of Prevotella buccae Cas13b (PbCas13b): Q646 or N647.
137. The engineered CRISPR-Cas protein of any one of preceding statements comprising one or more mutation of an amino acid corresponding to the following amino acids of Prevotella buccae Cas13b (PbCas13b): N653 or N652.
138. The engineered CRISPR-Cas protein of any one of preceding statements comprising in helical domain 2 one or more mutation of an amino acid corresponding to the following amino acids in helical domain 2 of Prevotella buccae Cas13b (PbCas13b): N653 or N652.
139. The engineered CRISPR-Cas protein of any one of preceding statements comprising one or more mutation of an amino acid corresponding to the following amino acids of Prevotella buccae Cas13b (PbCas13b): K590, N634, R638, N652, N653, K655, S658, K741, or K744.
140. The engineered CRISPR-Cas protein of any one of preceding statements comprising in helical domain 2 one or more mutation of an amino acid corresponding to the following amino acids in helical domain 2 of Prevotella buccae Cas13b (PbCas13b): K590, N634, R638, N652, N653, K655, S658, K741, or K744.
141. The engineered CRISPR-Cas protein of any one of preceding statements comprising one or more mutation of an amino acid corresponding to the following amino acids of Prevotella buccae Cas13b (PbCas13b): R600, K607, K612, R614, K617, or R618.
142. The engineered CRISPR-Cas protein of any one of preceding statements comprising in helical domain 2 one or more mutation of an amino acid corresponding to the following amino acids in helical domain 2 of Prevotella buccae Cas13b (PbCas13b): R600, K607, K612, R614, K617, or R618.
143. The engineered CRISPR-Cas protein of any one of preceding statements comprising one or more mutation of an amino acid corresponding to the following amino acids of Prevotella buccae Cas13b (PbCas13b): R285, R287, K292, E296, N297, or K294.
144. The engineered CRISPR-Cas protein of any one of preceding statements comprising in the IDL domain one or more mutation of an amino acid corresponding to the following amino acids in the IDL domain of Prevotella buccae Cas13b (PbCas13b): R285, R287, K292, E296, N297, or K294.
145. The engineered CRISPR-Cas protein of any one of preceding statements comprising one or more mutation of an amino acid corresponding to the following amino acids of Prevotella buccae Cas13b (PbCas13b): R285, K292, E296, or N297.
146. The engineered CRISPR-Cas protein of any one of preceding statements comprising in the IDL domain one or more mutation of an amino acid corresponding to the following amino acids in the IDL domain of Prevotella buccae Cas13b (PbCas13b): R285, K292, E296, or N297.
147. The engineered CRISPR-Cas protein of any one of preceding statements comprising one or more mutation of an amino acid corresponding to the following amino acids of Prevotella buccae Cas13b (PbCas13b): T405, H500, K570, K590, N634, R638, N652, N653, K655, S658, K741, K744, N756, S757, R762, R791, K846, K857, K870, R877, K183, K193, R600, K607, K612, R614, K617, K826, K828, K829, R824, R830, Q831, K835, K836, R838, R618, D434, K431, R285, R287, K292, E296, N297, Q646, N647, or K294.
148. The engineered CRISPR-Cas protein of any one of preceding statements comprising one or more mutation of an amino acid corresponding to the following amino acids of Prevotella buccae Cas13b (PbCas13b): R402, K393, N653, N652, R482, N480, D396, E397, D398, or E399.
149. The engineered CRISPR-Cas protein of any one of preceding statements comprising one or more mutation of an amino acid corresponding to the following amino acids of Prevotella buccae Cas13b (PbCas13b): R53, K655, R762, or R1041; preferably R53A or R53D; K655A; R762A; or R1041E or R1041D.
150. The engineered CRISPR-Cas protein of any one of preceding statements comprising one or more mutation of an amino acid corresponding to the following amino acids of Prevotella buccae Cas13b (PbCas13b): N297, E296, K292, or R285; preferably N297A, E296A, K292A, or R285A.
151. The engineered CRISPR-Cas protein of any one of preceding statements comprising in (the central channel of) the IDL domain one or more mutation of an amino acid corresponding to the following amino acids in (the central channel of) the IDL domain of Prevotella buccae Cas13b (PbCas13b): N297, E296, K292, or R285; preferably N297A, E296A, K292A, or R285A.
152. The engineered CRISPR-Cas protein of any one of preceding statements comprising one or more mutation of an amino acid corresponding to the following amino acids of Prevotella buccae Cas13b (PbCas13b): Q831, K836, R838, N652, N653, R830, K655 or R762; preferably Q831A, K836A, R838A, N652A, N653A, R830A, K655A, or R762A.
153. The engineered CRISPR-Cas protein of any one of preceding statements comprising one or more mutation of an amino acid corresponding to the following amino acids of Prevotella buccae Cas13b (PbCas13b): N652, N653, R830, K655 or R762; preferably N652A, N653A, R830A, K655A, or R762A.
154. The engineered CRISPR-Cas protein of any one of preceding statements comprising one or more mutation of an amino acid corresponding to the following amino acids of Prevotella buccae Cas13b (PbCas13b): K655 or R762; preferably K655A or R762A.
155. The engineered CRISPR-Cas protein of any one of preceding statements comprising in a helical domain one or more mutation of an amino acid corresponding to the following amino acids in a helical domain of Prevotella buccae Cas13b (PbCas13b): Q831, K836, R838, N652, N653, R830, K655 or R762; preferably Q831A, K836A, R838A, N652A, N653A, R830A, K655A, or R762A.
156. The engineered CRISPR-Cas protein of any one of preceding statements comprising a helical domain one or more mutation of an amino acid corresponding to the following amino acids a helical domain of Prevotella buccae Cas13b (PbCas13b): N652, N653, R830, K655 or R762; preferably N652A, N653A, R830A, K655A, or R762A.
157. The engineered CRISPR-Cas protein of any one of preceding statements comprising in helical domain 2 one or more mutation of an amino acid corresponding to the following amino acids in helical domain 2 of Prevotella buccae Cas13b (PbCas13b): K655 or R762; preferably K655A or R762A.
158. The engineered CRISPR-Cas protein of any one of preceding statements comprising one or more mutation of an amino acid corresponding to the following amino acids of Prevotella buccae Cas13b (PbCas13b): R614, K607, K193, K183 or R600; preferably R614A, K607A, K193A, K183A or R600A.
159. The engineered CRISPR-Cas protein of any one of preceding statements comprising in the trans-subunit loop of helical domain 2 one or more mutation of an amino acid corresponding to the following amino acids in the trans-subunit loop of helical domain 2 of Prevotella buccae Cas13b (PbCas13b): Q646 or N647; preferably Q646A or N647A.
160. The engineered CRISPR-Cas protein of any one of preceding statements comprising one or more mutation of an amino acid corresponding to the following amino acids of Prevotella buccae Cas13b (PbCas13b): R53 or R1041; preferably R53A or R53D, or R1041E or R1041D.
161. The engineered CRISPR-Cas protein of any one of preceding statements comprising in a HEPN domain one or more mutation of an amino acid corresponding to the following amino acids in a HEPN domain of Prevotella buccae Cas13b (PbCas13b): R53 or R1041; preferably R53A or R53D, or R1041E or R1041D.
162. The engineered CRISPR-Cas protein of any one of preceding statements comprising one or more mutation of an amino acid corresponding to the following amino acids of Prevotella buccae Cas13b (PbCas13b): K457, D397, E398, D399, E400, T405, H407 or D434; preferably D397A, E398A, D399A, E400A, T405A, H407A, H407W, H407Y, H407F or D434A.
163. The engineered CRISPR-Cas protein of any one of preceding statements comprising in the LID domain one or more mutation of an amino acid corresponding to the following amino acids in the LID domain of Prevotella buccae Cas13b (PbCas13b): K457, D397, E398, D399, E400, T405, H407 or D434; preferably D397A, E398A, D399A, E400A, T405A, H407A, H407W, H407Y, H407F or D434A.
164. The engineered CRISPR-Cas protein of any one of preceding statements, wherein the amino acids correspond to the following amino acids of Prevotella buccae Cas13b (PbCas13b): amino acids 46-57, 73-79, 152-164, 1036-1046, and 1064-1074.
165. The engineered CRISPR-Cas protein of any one of preceding statements, comprising one or more mutation of an amino acid corresponding to the following amino acids of Prevotella buccae Cas13b (PbCas13b): R156, N157, H161, R1068, N1069, and H1073.
166. The engineered CRISPR-Cas protein of any one of preceding statements, comprising one or more mutation of an amino acid corresponding to the following amino acids of Prevotella buccae Cas13b (PbCas13b): R285, R287, K292, K294, E296, and N297.
167. The engineered CRISPR-Cas protein of any one of preceding statements, comprising one or more mutation of an amino acid corresponding to the following amino acids of Prevotella buccae Cas13b (PbCas13b): K826, K828, K829, R824, R830, Q831, K835, K836, and R838.
168. The engineered CRISPR-Cas protein of any one of preceding statements, comprising one or more mutation of an amino acid corresponding to the following amino acids of Prevotella buccae Cas13b (PbCas13b): T405, H407, K457, H500, K570, K590, N634, R638, N652, N653, K655, S658, K741, K744, N756, S757, R762, R791, K846, K857, K870, and R877.
169. The engineered CRISPR-Cas protein of any one of preceding statements comprising a mutation of an amino acid corresponding to amino acid T405 of Prevotella buccae Cas13b (PbCas13b).
170. The engineered CRISPR-Cas protein of any one of preceding statements comprising a mutation of an amino acid corresponding to amino acid H407 of Prevotella buccae Cas13b (PbCas13b).
171. The engineered CRISPR-Cas protein of any one of preceding statements comprising a mutation of an amino acid corresponding to amino acid K457 of Prevotella buccae Cas13b (PbCas13b).
172. The engineered CRISPR-Cas protein of any one of preceding statements comprising a mutation of an amino acid corresponding to amino acid H500 of Prevotella buccae Cas13b (PbCas13b).
173. The engineered CRISPR-Cas protein of any one of preceding statements comprising a mutation of an amino acid corresponding to amino acid K570 of Prevotella buccae Cas13b (PbCas13b).
174. The engineered CRISPR-Cas protein of any one of preceding statements comprising a mutation of an amino acid corresponding to amino acid K590 of Prevotella buccae Cas13b (PbCas13b).
175. The engineered CRISPR-Cas protein of any one of preceding statements comprising a mutation of an amino acid corresponding to amino acid N634 of Prevotella buccae Cas13b (PbCas13b).
176. The engineered CRISPR-Cas protein of any one of preceding statements comprising a mutation of an amino acid corresponding to amino acid R638 of Prevotella buccae Cas13b (PbCas13b).
177. The engineered CRISPR-Cas protein of any one of preceding statements comprising a mutation of an amino acid corresponding to amino acid N652 of Prevotella buccae Cas13b (PbCas13b).
178. The engineered CRISPR-Cas protein of any one of preceding statements comprising a mutation of an amino acid corresponding to amino acid N653 of Prevotella buccae Cas13b (PbCas13b).
179. The engineered CRISPR-Cas protein of any one of preceding statements comprising a mutation of an amino acid corresponding to amino acid K655 of Prevotella buccae Cas13b (PbCas13b).
180. The engineered CRISPR-Cas protein of any one of preceding statements comprising a mutation of an amino acid corresponding to amino acid S658 of Prevotella buccae Cas13b (PbCas13b).
181. The engineered CRISPR-Cas protein of any one of preceding statements comprising a mutation of an amino acid corresponding to amino acid K741 of Prevotella buccae Cas13b (PbCas13b).
182. The engineered CRISPR-Cas protein of any one of preceding statements comprising a mutation of an amino acid corresponding to amino acid K744 of Prevotella buccae Cas13b (PbCas13b).
183. The engineered CRISPR-Cas protein of any one of preceding statements comprising a mutation of an amino acid corresponding to amino acid N756 of Prevotella buccae Cas13b (PbCas13b).
184. The engineered CRISPR-Cas protein of any one of preceding statements comprising a mutation of an amino acid corresponding to amino acid S757 of Prevotella buccae Cas13b (PbCas13b).
185. The engineered CRISPR-Cas protein of any one of preceding statements comprising a mutation of an amino acid corresponding to amino acid R762 of Prevotella buccae Cas13b (PbCas13b).
186. The engineered CRISPR-Cas protein of any one of preceding statements comprising a mutation of an amino acid corresponding to amino acid R791 of Prevotella buccae Cas13b (PbCas13b).
187. The engineered CRISPR-Cas protein of any one of preceding statements comprising a mutation of an amino acid corresponding to amino acid K846 of Prevotella buccae Cas13b (PbCas13b).
188. The engineered CRISPR-Cas protein of any one of preceding statements comprising a mutation of an amino acid corresponding to amino acid K857 of Prevotella buccae Cas13b (PbCas13b).
189. The engineered CRISPR-Cas protein of any one of preceding statements comprising a mutation of an amino acid corresponding to amino acid K870 of Prevotella buccae Cas13b (PbCas13b).
190. The engineered CRISPR-Cas protein of any one of preceding statements comprising a mutation of an amino acid corresponding to amino acid R877 of Prevotella buccae Cas13b (PbCas13b).
191. The engineered CRISPR-Cas protein of any one of preceding statements comprising a mutation of an amino acid corresponding to amino acid K183 of Prevotella buccae Cas13b (PbCas13b).
192. The engineered CRISPR-Cas protein of any one of preceding statements comprising a mutation of an amino acid corresponding to amino acid K193 of Prevotella buccae Cas13b (PbCas13b).
193. The engineered CRISPR-Cas protein of any one of preceding statements comprising a mutation of an amino acid corresponding to amino acid R600 of Prevotella buccae Cas13b (PbCas13b).
194. The engineered CRISPR-Cas protein of any one of preceding statements comprising a mutation of an amino acid corresponding to amino acid K607 of Prevotella buccae Cas13b (PbCas13b).
195. The engineered CRISPR-Cas protein of any one of preceding statements comprising a mutation of an amino acid corresponding to amino acid K612 of Prevotella buccae Cas13b (PbCas13b).
196. The engineered CRISPR-Cas protein of any one of preceding statements comprising a mutation of an amino acid corresponding to amino acid R614 of Prevotella buccae Cas13b (PbCas13b).
197. The engineered CRISPR-Cas protein of any one of preceding statements comprising a mutation of an amino acid corresponding to amino acid K617 of Prevotella buccae Cas13b (PbCas13b).
198. The engineered CRISPR-Cas protein of any one of preceding statements comprising a mutation of an amino acid corresponding to amino acid K826 of Prevotella buccae Cas13b (PbCas13b).
199. The engineered CRISPR-Cas protein of any one of preceding statements comprising a mutation of an amino acid corresponding to amino acid K828 of Prevotella buccae Cas13b (PbCas13b).
200. The engineered CRISPR-Cas protein of any one of preceding statements comprising a mutation of an amino acid corresponding to amino acid K829 of Prevotella buccae Cas13b (PbCas13b).
201. The engineered CRISPR-Cas protein of any one of preceding statements comprising a mutation of an amino acid corresponding to amino acid R824 of Prevotella buccae Cas13b (PbCas13b).
202. The engineered CRISPR-Cas protein of any one of preceding statements comprising a mutation of an amino acid corresponding to amino acid R830 of Prevotella buccae Cas13b (PbCas13b).
203. The engineered CRISPR-Cas protein of any one of preceding statements comprising a mutation of an amino acid corresponding to amino acid Q831 of Prevotella buccae Cas13b (PbCas13b).
204. The engineered CRISPR-Cas protein of any one of preceding statements comprising a mutation of an amino acid corresponding to amino acid K835 of Prevotella buccae Cas13b (PbCas13b).
205. The engineered CRISPR-Cas protein of any one of preceding statements comprising a mutation of an amino acid corresponding to amino acid K836 of Prevotella buccae Cas13b (PbCas13b).
206. The engineered CRISPR-Cas protein of any one of preceding statements comprising a mutation of an amino acid corresponding to amino acid R838 of Prevotella buccae Cas13b (PbCas13b).
207. The engineered CRISPR-Cas protein of any one of preceding statements comprising a mutation of an amino acid corresponding to amino acid R618 of Prevotella buccae Cas13b (PbCas13b).
208. The engineered CRISPR-Cas protein of any one of preceding statements comprising a mutation of an amino acid corresponding to amino acid D434 of Prevotella buccae Cas13b (PbCas13b).
209. The engineered CRISPR-Cas protein of any one of preceding statements comprising a mutation of an amino acid corresponding to amino acid K431 of Prevotella buccae Cas13b (PbCas13b).
210. The engineered CRISPR-Cas protein of any one of preceding statements comprising a mutation of an amino acid corresponding to amino acid R53 of Prevotella buccae Cas13b (PbCas13b).
211. The engineered CRISPR-Cas protein of any one of preceding statements comprising a mutation of an amino acid corresponding to amino acid K943 of Prevotella buccae Cas13b (PbCas13b).
212. The engineered CRISPR-Cas protein of any one of preceding statements comprising a mutation of an amino acid corresponding to amino acid R1041 of Prevotella buccae Cas13b (PbCas13b).
213. The engineered CRISPR-Cas protein of any one of preceding statements comprising a mutation of an amino acid corresponding to amino acid Y164 of Prevotella buccae Cas13b (PbCas13b).
214. The engineered CRISPR-Cas protein of any one of preceding statements comprising a mutation of an amino acid corresponding to amino acid R285 of Prevotella buccae Cas13b (PbCas13b).
215. The engineered CRISPR-Cas protein of any one of preceding statements comprising a mutation of an amino acid corresponding to amino acid R287 of Prevotella buccae Cas13b (PbCas13b).
216. The engineered CRISPR-Cas protein of any one of preceding statements comprising a mutation of an amino acid corresponding to amino acid K292 of Prevotella buccae Cas13b (PbCas13b).
217. The engineered CRISPR-Cas protein of any one of preceding statements comprising a mutation of an amino acid corresponding to amino acid E296 of Prevotella buccae Cas13b (PbCas13b).
218. The engineered CRISPR-Cas protein of any one of preceding statements comprising a mutation of an amino acid corresponding to amino acid N297 of Prevotella buccae Cas13b (PbCas13b).
219. The engineered CRISPR-Cas protein of any one of preceding statements comprising a mutation of an amino acid corresponding to amino acid Q646 of Prevotella buccae Cas13b (PbCas13b).
220. The engineered CRISPR-Cas protein of any one of preceding statements comprising a mutation of an amino acid corresponding to amino acid N647 of Prevotella buccae Cas13b (PbCas13b).
221. The engineered CRISPR-Cas protein of any one of preceding statements comprising a mutation of an amino acid corresponding to amino acid R402 of Prevotella buccae Cas13b (PbCas13b).
222. The engineered CRISPR-Cas protein of any one of preceding statements comprising a mutation of an amino acid corresponding to amino acid K393 of Prevotella buccae Cas13b (PbCas13b).
223. The engineered CRISPR-Cas protein of any one of preceding statements comprising a mutation of an amino acid corresponding to amino acid N653 of Prevotella buccae Cas13b (PbCas13b).
224. The engineered CRISPR-Cas protein of any one of preceding statements comprising a mutation of an amino acid corresponding to amino acid N652 of Prevotella buccae Cas13b (PbCas13b).
225. The engineered CRISPR-Cas protein of any one of preceding statements comprising a mutation of an amino acid corresponding to amino acid R482 of Prevotella buccae Cas13b (PbCas13b).
226. The engineered CRISPR-Cas protein of any one of preceding statements comprising a mutation of an amino acid corresponding to amino acid N480 of Prevotella buccae Cas13b (PbCas13b).
227. The engineered CRISPR-Cas protein of any one of preceding statements comprising a mutation of an amino acid corresponding to amino acid D396 of Prevotella buccae Cas13b (PbCas13b).
228. The engineered CRISPR-Cas protein of any one of preceding statements comprising a mutation of an amino acid corresponding to amino acid E397 of Prevotella buccae Cas13b (PbCas13b).
229. The engineered CRISPR-Cas protein of any one of preceding statements comprising a mutation of an amino acid corresponding to amino acid D398 of Prevotella buccae Cas13b (PbCas13b).
230. The engineered CRISPR-Cas protein of any one of preceding statements comprising a mutation of an amino acid corresponding to amino acid E399 of Prevotella buccae Cas13b (PbCas13b).
231. The engineered CRISPR-Cas protein of any one of preceding statements comprising a mutation of an amino acid corresponding to amino acid K294 of Prevotella buccae Cas13b (PbCas13b).
232. The engineered CRISPR-Cas protein of any one of preceding statements comprising a mutation of an amino acid corresponding to amino acid E400 of Prevotella buccae Cas13b (PbCas13b).
233. The engineered CRISPR-Cas protein of any one of preceding statements comprising a mutation of an amino acid corresponding to amino acid R56 of Prevotella buccae Cas13b (PbCas13b).
234. The engineered CRISPR-Cas protein of any one of preceding statements comprising a mutation of an amino acid corresponding to amino acid N157 of Prevotella buccae Cas13b (PbCas13b).
235. The engineered CRISPR-Cas protein of any one of preceding statements comprising a mutation of an amino acid corresponding to amino acid H161 of Prevotella buccae Cas13b (PbCas13b).
236. The engineered CRISPR-Cas protein of any one of preceding statements comprising a mutation of an amino acid corresponding to amino acid H452 of Prevotella buccae Cas13b (PbCas13b).
237. The engineered CRISPR-Cas protein of any one of preceding statements comprising a mutation of an amino acid corresponding to amino acid N455 of Prevotella buccae Cas13b (PbCas13b).
238. The engineered CRISPR-Cas protein of any one of preceding statements comprising a mutation of an amino acid corresponding to amino acid K484 of Prevotella buccae Cas13b (PbCas13b).
239. The engineered CRISPR-Cas protein of any one of preceding statements comprising a mutation of an amino acid corresponding to amino acid N486 of Prevotella buccae Cas13b (PbCas13b).
240. The engineered CRISPR-Cas protein of any one of preceding statements comprising a mutation of an amino acid corresponding to amino acid G566 of Prevotella buccae Cas13b (PbCas13b).
241. The engineered CRISPR-Cas protein of any one of preceding statements comprising a mutation of an amino acid corresponding to amino acid H567 of Prevotella buccae Cas13b (PbCas13b).
242. The engineered CRISPR-Cas protein of any one of preceding statements comprising a mutation of an amino acid corresponding to amino acid A656 of Prevotella buccae Cas13b (PbCas13b).
243. The engineered CRISPR-Cas protein of any one of preceding statements comprising a mutation of an amino acid corresponding to amino acid V795 of Prevotella buccae Cas13b (PbCas13b).
244. The engineered CRISPR-Cas protein of any one of preceding statements comprising a mutation of an amino acid corresponding to amino acid A796 of Prevotella buccae Cas13b (PbCas13b).
245. The engineered CRISPR-Cas protein of any one of preceding statements comprising a mutation of an amino acid corresponding to amino acid W842 of Prevotella buccae Cas13b (PbCas13b).
246. The engineered CRISPR-Cas protein of any one of preceding statements comprising a mutation of an amino acid corresponding to amino acid K871 of Prevotella buccae Cas13b (PbCas13b).
247. The engineered CRISPR-Cas protein of any one of preceding statements comprising a mutation of an amino acid corresponding to amino acid E873 of Prevotella buccae Cas13b (PbCas13b).
248. The engineered CRISPR-Cas protein of any one of preceding statements comprising a mutation of an amino acid corresponding to amino acid R874 of Prevotella buccae Cas13b (PbCas13b).
249. The engineered CRISPR-Cas protein of any one of preceding statements comprising a mutation of an amino acid corresponding to amino acid R1068 of Prevotella buccae Cas13b (PbCas13b).
250. The engineered CRISPR-Cas protein of any one of preceding statements comprising a mutation of an amino acid corresponding to amino acid N1069 of Prevotella buccae Cas13b (PbCas13b).
251. The engineered CRISPR-Cas protein of any one of preceding statements comprising a mutation of an amino acid corresponding to amino acid H1073 of Prevotella buccae Cas13b (PbCas13b).
252. The engineered CRISPR-Cas protein of any one of preceding statements comprising one or more mutation of an amino acid corresponding to the following amino acids of Leptotrichia shahii Cas13a (LshCas13a): R597, N598, H602, R1278, N1279, or H1283.
253. The engineered CRISPR-Cas protein of any one of preceding statements comprising one or more mutation of an amino acid corresponding to the following amino acids of Leptotrichia shahii Cas13a (LshCas13a): R597, N598, H602, R1278, N1279, or H1283.
254. The engineered CRISPR-Cas protein of any one of preceding statements comprising in a HEPN domain one or more mutation of an amino acid corresponding to the following amino acids in a HEPN domain of Leptotrichia shahii Cas13a (LshCas13a): R597, N598, H602, R1278, N1279, or H1283.
255. The engineered CRISPR-Cas protein of any one of preceding statements comprising one or more mutation of an amino acid corresponding to the following amino acids of Leptotrichia shahii Cas13a (LshCas13a): R597, N598, or H602.
256. The engineered CRISPR-Cas protein of any one of preceding statements comprising in HEPN domain 1 one or more mutation of an amino acid corresponding to the following amino acids in HEPN domain 1 of Leptotrichia shahii Cas13a (LshCas13a): R597, N598, or H602.
257. The engineered CRISPR-Cas protein of any one of preceding statements comprising one or more mutation of an amino acid corresponding to the following amino acids of Leptotrichia shahii Cas13a (LshCas13a): R1278, N1279, or H1283.
258. The engineered CRISPR-Cas protein of any one of preceding statements comprising in HEPN domain 2 one or more mutation of an amino acid corresponding to the following amino acids in HEPN domain 2 of Leptotrichia shahii Cas13a (LshCas13a): R1278, N1279, or H1283.
259. The engineered CRISPR-Cas protein of any one of preceding statements comprising one or more mutation of an amino acid corresponding to the following amino acids of Porphyromonas gulae Cas13b (PguCas13b): R146, H151, R1116, or H1121.
260. The engineered CRISPR-Cas protein of any one of preceding statements comprising one or more mutation of an amino acid corresponding to the following amino acids of Porphyromonas gulae Cas13b (PguCas13b): R146, H151, R1116, or H1121.
261. The engineered CRISPR-Cas protein of any one of preceding statements comprising in a HEPN domain one or more mutation of an amino acid corresponding to the following amino acids in a HEPN domain of Porphyromonas gulae Cas13b (PguCas13b): R146, H151, R1116, or H1121.
262. The engineered CRISPR-Cas protein of any one of preceding statements comprising one or more mutation of an amino acid corresponding to the following amino acids of Porphyromonas gulae Cas13b (PguCas13b): R146 or H151.
263. The engineered CRISPR-Cas protein of any one of preceding statements comprising in HEPN domain 1 one or more mutation of an amino acid corresponding to the following amino acids in HEPN domain 1 of Porphyromonas gulae Cas13b (PguCas13b): R146 or H151.
264. The engineered CRISPR-Cas protein of any one of preceding statements comprising one or more mutation of an amino acid corresponding to the following amino acids of Porphyromonas gulae Cas13b (PguCas13b): R1116 or H1121.
265. The engineered CRISPR-Cas protein of any one of preceding statements comprising in HEPN domain 2 one or more mutation of an amino acid corresponding to the following amino acids in HEPN domain 2 of Porphyromonas gulae Cas13b (PguCas13b): R1116 or H1121.
266. The engineered CRISPR-Cas protein of any one of preceding statements comprising one or more mutation of an amino acid corresponding to the following amino acids of Prevotella sp. P5-125 Cas13b (PspCas13b): H133 or H1058.
267. The engineered CRISPR-Cas protein of any one of preceding statements comprising one or more mutation of an amino acid corresponding to the following amino acids of Prevotella sp. P5-125 Cas13b (PspCas13b): H133 or H1058.
268. The engineered CRISPR-Cas protein of any one of preceding statements comprising in a HEPN domain one or more mutation of an amino acid corresponding to the following amino acids in a HEPN domain of Prevotella sp. P5-125 Cas13b (PspCas13b): H133 or H1058.
269. The engineered CRISPR-Cas protein of any one of preceding statements comprising a mutation of an amino acid corresponding to amino acid H133 of Prevotella sp. P5-125 Cas13b (PspCas13b).
270. The engineered CRISPR-Cas protein of any one of preceding statements comprising in HEPN domain 1 a mutation of an amino acid corresponding to amino acid H133 in HEPN domain 1 of Prevotella sp. P5-125 Cas13b (PspCas13b).
271. The engineered CRISPR-Cas protein of any one of preceding statements comprising a mutation of an amino acid corresponding to amino acid H1058 of Prevotella sp. P5-125 Cas13b (PspCas13b).
272. The engineered CRISPR-Cas protein of any one of preceding statements comprising in HEPN domain 2 a mutation of an amino acid corresponding to the amino acid H1058 in HEPN domain 2 of Prevotella sp. P5-125 Cas13b (PspCas13b).
273. The engineered CRISPR-Cas protein of any of statements 8 to 272, wherein said amino acid is mutated to A, P, or V, preferably A.
274. The engineered CRISPR-Cas protein of any of statements 8 to 272, wherein said amino acid is mutated to a hydrophobic amino acid.
275. The engineered CRISPR-Cas protein of any of statements 8 to 272, wherein said amino acid is mutated to an aromatic amino acid.
276. The engineered CRISPR-Cas protein of any of statements 8 to 272, wherein said amino acid is mutated to a charged amino acid.
277. The engineered CRISPR-Cas protein of any of statements 8 to 272, wherein said amino acid is mutated to a positively charged amino acid.
278. The engineered CRISPR-Cas protein of any of statements 8 to 272, wherein said amino acid is mutated to a negatively charged amino acid.
279. The engineered CRISPR-Cas protein of any of statements 8 to 272, wherein said amino acid is mutated to a polar amino acid.
280. The engineered CRISPR-Cas protein of any of statements 8 to 272, wherein said amino acid is mutated to an aliphatic amino acid.

[1192] 281. The engineered CRISPR-Cas protein of any one of preceding statements, wherein said Cas13 protein is or originates from a species of the genus Alistipes, Anaerosalibacter, Bacteroides, Bacteroidetes, Bergeyella, Blautia, Butyrivibrio, Capnocytophaga, Carnobacterium, Chloroflexus, Chryseobacterium, Clostridium, Demequina, Eubacteriaceae, Eubacterium, Flavobacterium, Fusobacterium, Herbinix, Insolitispirillum, Lachnospiraceae, Leptotrichia, Listeria, Myroides, Paludibacter, Phaeodactylibacter, Porphyromonadaceae, Porphyromonas, Prevotella, Pseudobutyrivibrio, Psychroflexus, Reichenbachiella, Rhodobacter, Riemerella, Sinomicrobium, Thalassospira, Ruminococcus; preferably Leptotrichia shahii, Listeria seeligeri, Lachnospiraceae bacterium (such as Lb MA2020, Lb NK4A179, Lb NK4A144), Clostridium aminophilum (such as Ca DSM 10710), Carnobacterium gallinarum (such as Cg DSM 4847), Paludibacter propionicigenes (such as Pp WB4), Listeria weihenstephanensis (such as Lw FSL R9-0317), Listeriaceae bacterium (such as Lb FSL M6-0635), Leptotrichia wadei (such as Lw F0279), Rhodobacter capsulatus (such as Rc SB 1003, Rc R121, Rc DE442), Leptotrichia buccalis (such as Lb C-1013-b), Herbinix hemicellulosilytica, Eubacteriaceae bacterium (such as Eb CHKCI004), Blautia. sp Marseille-P2398, Leptotrichia sp. oral taxon 879 str. F0557, Chloroflexus aggregans, Demequina aurantiaca, Thalassospira sp. TSL5-1, Pseudobutyrivibrio sp. OR37, Butyrivibrio sp. YAB3001, Leptotrichia sp. Marseille-P3007, Bacteroides ihuae, Porphyromonadaceae bacterium (such as Pb KH3CP3RA), Listeria riparia, Insolitispirillum peregrinum, Alistipes sp. ZOR0009, Bacteroides pyogenes (such as Bp F0041), Bacteroidetes bacterium (such as Bb GWA2_31_9), Bergeyella zoohelcum (such as Bz ATCC 43767), Capnocytophaga canimorsus, Capnocytophaga cynodegmi, Chryseobacterium carnipullorum, Chryseobacterium jejuense, Chryseobacterium ureilyticum, Flavobacterium branchiophilum, Flavobacterium columnare, Flavobacterium sp. 316, Myroides odoratimimus (such as Mo CCUG 10230, Mo CCUG 12901, Mo CCUG 3837), Paludibacter propionicigenes, Phaeodactylibacter xiamenensis, Porphyromonas gingivalis (such as Pg F0185, Pg F0568, Pg JCVI SC001, Pg W4087, Porphyromonas gulae, Porphyromonas sp. COT-052 OH4946, Prevotella aurantiaca, Prevotella buccae (such as Pb ATCC 33574), Prevotella falsenii, Prevotella intermedia (such as Pi 17, Pi ZT), Prevotella pallens (such as Pp ATCC 700821), Prevotella pleuritidis, Prevotella saccharolytica (such as Ps F0055), Prevotella sp. MA2016, Prevotella sp. MSX73, Prevotella sp. P4-76, Prevotella sp. P5-119, Prevotella sp. P5-125, Prevotella sp. P5-60,Psychroflexus torquis, Reichenbachiella agariperforans, Riemerella anatipestifer, Sinomicrobium oceani, Fusobacterium necrophorum (such as Fn subsp. funduliforme ATCC 51357, Fn DJ-2, Fn BFTR-1, Fn subsp. funduliforme), Fusobacterium perfoetens (such as Fp ATCC 29250), Fusobacterium ulcerans (such as Fu ATCC 49185), Anaerosalibacter sp. ND1, Eubacterium siraeum, Ruminococcus flavefaciens (such as Rfx XPD3002), or Ruminococcus albus.

282. The engineered CRISPR-Cas protein of any one of preceding statements, wherein said Cas13 protein is a Cas13a protein.
283. The engineered CRISPR-Cas protein of statement 282, wherein said Cas13a protein is or originates from a species of the genus Bacteroides, Blautia, Butyrivibrio, Carnobacterium, Chloroflexus, Clostridium, Demequina, Eubacterium, Herbinix, Insolitispirillum, Lachnospiraceae, Leptotrichia, Listeria, Paludibacter, Porphyromonadaceae, Pseudobutyrivibrio, Rhodobacter, or Thalassospira; preferably Leptotrichia shahii, Listeria seeligeri, Lachnospiraceae bacterium (such as Lb MA2020, Lb NK4A179, Lb NK4A144), Clostridium aminophilum (such as Ca DSM 10710), Carnobacterium gallinarum (such as Cg DSM 4847), Paludibacter propionicigenes (such as Pp WB4), Listeria weihenstephanensis (such as Lw FSL R9-0317), Listeriaceae bacterium (such as Lb FSL M6-0635), Leptotrichia wadei (such as Lw F0279), Rhodobacter capsulatus (such as Rc SB 1003, Rc R121, Rc DE442), Leptotrichia buccalis (such as Lb C-1013-b), Herbinix hemicellulosilytica, Eubacteriaceae bacterium (such as Eb CHKCI004), Blautia. sp Marseille-P2398, Leptotrichia sp. oral taxon 879 str. F0557, Chloroflexus aggregans, Demequina aurantiaca, Thalassospira sp. TSL5-1, Pseudobutyrivibrio sp. OR37, Butyrivibrio sp. YAB3001, Leptotrichia sp. Marseille-P3007, Bacteroides ihuae, Porphyromonadaceae bacterium (such as Pb KH3CP3RA), Listeria riparia, or Insolitispirillum peregrinum.
284. The engineered CRISPR-Cas protein of any one of preceding statements, wherein said Cas13 protein is a Cas13b protein.
285. The engineered CRISPR-Cas protein of statement 284, wherein said Cas13b protein is or originates from a species of the genus Alistipes, Bacteroides, Bacteroidetes, Bergeyella, Capnocytophaga, Chryseobacterium, Flavobacterium, Myroides, Paludibacter, Phaeodactylibacter, Porphyromonas, Prevotella, Psychroflexus, Reichenbachiella, Riemerella, or Sinomicrobium; preferably Alistipes sp. ZOR0009, Bacteroides pyogenes (such as Bp F0041), Bacteroidetes bacterium (such as Bb GWA2_31_9), Bergeyella zoohelcum (such as Bz ATCC 43767), Capnocytophaga canimorsus, Capnocytophaga cynodegmi, Chryseobacterium carnipullorum, Chryseobacterium jejuense, Chryseobacterium ureilyticum, Flavobacterium branchiophilum, Flavobacterium columnare, Flavobacterium sp. 316, Myroides odoratimimus (such as Mo CCUG 10230, Mo CCUG 12901, Mo CCUG 3837), Paludibacter propionicigenes, Phaeodactylibacter xiamenensis, Porphyromonas gingivalis (such as Pg F0185, Pg F0568, Pg JCVI SC001, Pg W4087, Porphyromonas gulae, Porphyromonas sp. COT-052 OH4946, Prevotella aurantiaca, Prevotella buccae (such as Pb ATCC 33574), Prevotella falsenii, Prevotella intermedia (such as Pi 17, Pi ZT), Prevotella pallens (such as Pp ATCC 700821), Prevotella pleuritidis, Prevotella saccharolytica (such as Ps F0055), Prevotella sp. MA2016, Prevotella sp. MSX73, Prevotella sp. P4-76, Prevotella sp. P5-119, Prevotella sp. P5-125, Prevotella sp. P5-60, Psychroflexus torquis, Reichenbachiella agariperforans, Riemerella anatipestifer, or Sinomicrobium oceani.
286. The engineered CRISPR-Cas protein any one of preceding statements, wherein said Cas13 protein is a Cas13c protein.
287. The engineered CRISPR-Cas protein of statement 286, wherein said Cas13c protein is or originates from a species of the genus Fusobacterium or Anaerosalibacter; preferably Fusobacterium necrophorum (such as Fn subsp. funduliforme ATCC 51357, Fn DJ-2, Fn BFTR-1, Fn subsp. funduliforme), Fusobacterium perfoetens (such as Fp ATCC 29250), Fusobacterium ulcerans (such as Fu ATCC 49185), or Anaerosalibacter sp. ND1.
288. The engineered CRISPR-Cas protein of any one of preceding statements, wherein said Cas13 protein is a Cas13d protein.
289. The engineered CRISPR-Cas protein of statement 288, wherein said Cas13d protein is originates from a species of the genus Eubacterium or Ruminococcus, preferably Eubacterium siraeum, Ruminococcus flavefaciens (such as Rfx XPD3002), or Ruminococcus albus.
290. The engineered CRISPR-Cas protein of any one of preceding statements, wherein catalytic activity of the engineered CRISPR-Cas protein is increased as compared to a corresponding wildtype CRISPR-Cas protein.
291. The engineered CRISPR-Cas protein of any one of preceding statements, wherein catalytic activity of the engineered CRISPR-Cas protein is decreased as compared to a corresponding wildtype CRISPR-Cas protein.
292. The engineered CRISPR-Cas protein of any one of preceding statements, wherein gRNA binding of the engineered CRISPR-Cas protein is increased as compared to a corresponding wildtype CRISPR-Cas protein.
293. The engineered CRISPR-Cas protein of any one of preceding statements, wherein gRNA binding of the engineered CRISPR-Cas protein is decreased as compared to a corresponding wildtype CRISPR-Cas protein.
294. The engineered CRISPR-Cas protein of any one of preceding statements, wherein specificity of the CRISPR-Cas protein is increased as compared to a corresponding wildtype CRISPR-Cas protein.
295. The engineered CRISPR-Cas protein of any one of preceding statements, wherein specificity of the CRISPR-Cas protein is decreased as compared to a corresponding wildtype CRISPR-Cas protein.
296. The engineered CRISPR-Cas protein of any one of preceding statements, wherein stability of the CRISPR-Cas protein is increased as compared to a corresponding wildtype CRISPR-Cas protein.
297. The engineered CRISPR-Cas protein of any one of preceding statements, wherein stability of the CRISPR-Cas protein is decreased as compared to a corresponding wildtype CRISPR-Cas protein.
298. The engineered CRISPR-Cas protein of any one of preceding statements, further comprising one or more mutations which inactivate catalytic activity.
299. The engineered CRISPR-Cas protein of any one of preceding statements, wherein off-target binding of the CRISPR-Cas protein is increased as compared to a corresponding wildtype CRISPR-Cas protein.
300. The engineered CRISPR-Cas protein of any one of preceding statements, wherein off-target binding of the CRISPR-Cas protein is decreased as compared to a corresponding wildtype CRISPR-Cas protein.
301. The engineered CRISPR-Cas protein of any one of preceding statements, wherein target binding of the CRISPR-Cas protein is increased as compared to a corresponding wildtype CRISPR-Cas protein.
302. The engineered CRISPR-Cas protein of any one of preceding statements, wherein target binding of the CRISPR-Cas protein is decreased as compared to a corresponding wildtype CRISPR-Cas protein.
303. The engineered CRISPR-Cas protein of any one of preceding statements, wherein the engineered CRISPR-Cas protein has a higher protease activity or polynucleotide-binding capability compared to a corresponding wildtype CRISPR-Cas protein.
304. The engineered CRISPR-Cas protein of any one of preceding statements, wherein PFS recognition is altered as compared to a corresponding wildtype CRISPR-Cas protein.
305. The engineered CRISPR-Cas protein of any one of preceding statements, further comprising a functional heterologous domain.
306. The engineered CRISPR-Cas protein of any one of preceding statements, further comprising an NLS.
307. The engineered CRISPR-Cas protein of any one of preceding statements, further comprising a NES.
308. An engineered CRISPR-Cas protein comprising one or more HEPN domains and is less than 1000 amino acids in length.
309. The engineered CRISPR-Cas protein of statement 308, wherein the protein is less than 950, less than 900, less than 850, less than 800, less, or than 750 amino acids in size.
310. The engineered CRISPR-Cas protein of statement 308 or 309, wherein the HEPN domain comprises a RxxxxH motif.
311. The engineered CRISPR-Cas protein of statement 310, wherein the RxxxxH motif comprises a R[N/H/K]X₁X₂X₃H sequence.
312. The engineered CRISPR-Cas protein of statement 311, wherein: X₁ is R, S, D, E, Q, N, G, or Y; X₂ is independently I, S, T, V, or L; and X₃ is independently L, F, N, Y, V, I, S, D, E, or A.
313. The engineered CRISPR-Cas protein of any one of statements 308-313, wherein the CRISPR-Cas protein is a Type VI CRISPR Cas protein.
314. The engineered CRISPR Cas protein of statement 313, wherein the Type VI CRISPR Cas protein is a Cas13a, a Cas13b, a Cas13c, or a Cas13d.
315. The engineered CRISPR-Cas protein of any one of statements 308 to 315, wherein the CRISPR-Cas protein is associated with a functional domain.
316. The engineered CRISPR-Cas protein of any one of statements 308 to 316, wherein the CRISPR-Cas protein comprises one or more mutations equivalent to mutations in any one of statements [1386]57-[1386]329.
317. The engineered CRISPR-Cas protein of statement 316, wherein the CRISPR-Cas protein comprises one or more mutations in the helical domain.
318. The engineered CRISPR-Cas protein of any one of statements 308 to 318, wherein the CRISPR-Cas protein is in a dead form or has nickase activity.
319. A polynucleotide encoding the engineered CRISPR-Cas protein of any of statements 1 to 318.
320. The polynucleotide according to statement 319, which is codon optimized.
321. A CRISPR-Cas system comprising the engineered CRISPR-Cas protein of any of statements 1 to [1386]367 or the polynucleotide of statement 318 or 319, and a nucleotide component capable of forming a complex with the engineered CRISPR-Cas protein and able to hybridize with a target nucleic acid sequence and direct sequence-specific binding of said complex to the target nucleic acid sequence.
322. A vector system comprising one or more vectors, the one or more vectors comprising one or more polynucleotide molecules encoding components of the engineered CRISPR-Cas protein of statement 321.
323. A method of modifying a target nucleic acid comprising: introducing in a cell or organism that comprises the target nucleic acid, the engineered CRISPR-Cas protein according to any of statements 1 to 318, the polynucleic acid according to statement 319 or 320, the CRISPR-Cas system according to statement 321, or the vector or vector system according to statement 322, such that the engineered CRISPR-Cas protein modifies the target nucleic acid in the cell or organism.
324. The method of statement [1386]372, wherein the engineered CRISPR-Cas system is introduced via delivery by liposomes, nanoparticles, exosomes, microvesicles, nucleic acid nanoassemblies, a gene gun, an implantable device, or the vector system of statement 322.
325. The method of statement 323 or 324, wherein the engineered CRISPR-cas protein is associated with one or more functional domains.
326. The method of any one of statements 323 to 325, wherein the target nucleic acid comprises a genomic locus, and the engineered CRISPR-Cas protein modifies gene product encoded at the genomic locus or expression of the gene product.
327. The method of any one of statements 323 to 326, wherein the target nucleic acid is DNA or RNA and wherein one or more nucleotides in the target nucleic acid are base edited.
328. The method of any one of statements 323 to 327, wherein the target nucleic acid is DNA or RNA and wherein the target nucleic acid is cleaved.
329. The method of statement 328, wherein the engineered CRISPR-Cas protein further cleaves non-target nucleic acid.
330. The method of statement 328 or 329, further comprising visualizing activity and, optionally, using a detectable label.
331. The method of any one of statements 328 to 330, further comprising detecting binding of one or more components of the CRISPR-Cas system to the target nucleic acid.
332. The method of any one of statements 328 to 331, wherein said cell or organisms is a eukaryotic cell or organism.
333. The method of any one of statements 328 to 332, wherein said cell or organisms is an animal cell or organism.
334. The method of any one of statements 328 to 333, wherein said cell or organisms is a plant cell or organism.
335. A method for detecting a target nucleic acid in a sample comprising: contacting a sample with: an engineered CRISPR-Cas protein of any one of statements 1 to 318; at least one guide polynucleotide comprising a guide sequence capable of binding to the target nucleic acid and designed to form a complex with the engineered CRISPR-Cas; and a RNA-based masking construct comprising a non-target sequence; wherein the engineered CRISPR-Cas protein exhibits collateral RNase activity and cleaves the non-target sequence of the detection construct; and detecting a signal from cleavage of the non-target sequence, thereby detecting the target nucleic acid in the sample.
336. The method of statement 335, further comprising contacting the sample with reagents for amplifying the target nucleic acid.
337. The method of statement 336, wherein the reagents for amplifying comprises isothermal amplification reaction reagents.
338. The method of statement 337, wherein the isothermal amplification reagents comprise nucleic-acid sequence-based amplification, recombinase polymerase amplification, loop-mediated isothermal amplification, strand displacement amplification, helicase-dependent amplification, or nicking enzyme amplification reagents.
339. The method of any one of statements 335 to 338, wherein the target nucleic acid is DNA molecule and the method further comprises contacting the target DNA molecule with a primer comprising an RNA polymerase site and RNA polymerase.
340. The method of any one of statements 335 to 339, wherein the masking construct: suppresses generation of a detectable positive signal until the masking construct cleaved or deactivated, or masks a detectable positive signal or generates a detectable negative signal until the masking construct cleaved or deactivated.
341. The method of any one of statements 335 to 340, wherein the masking construct comprises: a. a silencing RNA that suppresses generation of a gene product encoded by a reporting construct, wherein the gene product generates the detectable positive signal when expressed; b. a ribozyme that generates the negative detectable signal, and wherein the positive detectable signal is generated when the ribozyme is deactivated; c. a ribozyme that converts a substrate to a first color and wherein the substrate converts to a second color when the ribozyme is deactivated; d. an aptamer and/or comprises a polynucleotide-tethered inhibitor; e. a polynucleotide to which a detectable ligand and a masking component are attached; f a nanoparticle held in aggregate by bridge molecules, wherein at least a portion of the bridge molecules comprises a polynucleotide, and wherein the solution undergoes a color shift when the nanoparticle is disbursed in solution; g. a quantum dot or fluorophore linked to one or more quencher molecules by a linking molecule, wherein at least a portion of the linking molecule comprises a polynucleotide; h. a polynucleotide in complex with an intercalating agent, wherein the intercalating agent changes absorbance upon cleavage of the polynucleotide; or 1. two fluorophores tethered by a polynucleotide that undergo a shift in fluorescence when released from the polynucleotide.
342. The method of statement 341, wherein the aptamer: a. comprises a polynucleotide-tethered inhibitor that sequesters an enzyme, wherein the enzyme generates a detectable signal upon release from the aptamer or polynucleotide-tethered inhibitor by acting upon a substrate; or b. is an inhibitory aptamer that inhibits an enzyme and prevents the enzyme from catalyzing generation of a detectable signal from a substrate or wherein the polynucleotide-tethered inhibitor inhibits an enzyme and prevents the enzyme from catalyzing generation of a detectable signal from a substrate; or c. sequesters a pair of agents that when released from the aptamers combine to generate a detectable signal.
343. The method of statement 341 or 342, wherein the nanoparticle is a colloidal metal.
344. The method of any one of statements 335 to 343, wherein the at least one guide polynucleotide comprises a mismatch.
345. The method of statement 344, wherein the mismatch is up- or downstream of a single nucleotide variation on the one or more guide sequences.
346. A cell or organism comprising the engineered CRISPR-Cas protein according to any of statements 1 to 318, the polynucleic acid according to statement 319 or 320, the CRISPR-Cas system according to statement 321, or the vector or vector system according to statement 322.
347. An engineered adenosine deaminase comprising one or more mutations, wherein the engineered adenosine deaminase has cytidine deaminase activity.
348. The engineered adenosine deaminase of statement 347, wherein the engineered adenosine deaminase has adenosine deaminase activity.
349. The engineered adenosine deaminase of statement 347 or 348, wherein the engineered adenosine deaminase is a portion of a fusion protein.
350. The engineered adenosine deaminase of statement 349, wherein the fusion protein comprises a functional domain.
351. The engineered adenosine deaminase of statement 350, wherein the functional domain is capable of directing the engineered adenosine deaminase to bind to a target nucleic acid.
352. The engineered adenosine deaminase of statement 350 or 351, wherein the functional domain is a CRISPR-Cas protein of any one of statements 1 to 318.
353. The engineered adenosine deaminase of statement 352, wherein the CRISPR-Cas protein is a dead form CRISPR-Cas protein or CRISPR-Cas nickase protein.
354. The engineered adenosine deaminase of any one of statements 347 to 353, wherein the one or more mutations comprises: E488Q, V351G, S486A, T375S, S370C, P462A, N597I, L332I, I398V, K350I, M383L, D619G, S582T, V440I, S495N, K418E, S661T based on amino acid sequence positions of hADAR2-D, and corresponding mutations in a homologous ADAR protein.
355. The engineered adenosine deaminase of any one of statements 347 to 354, wherein the one or more mutations comprises: E488Q, V351G, S486A, T375S, S370C, P462A, N597I, L332I, I398V, K350I, M383L, D619G, S582T, V440I, S495N, K418E, and S661T based on amino acid sequence positions of hADAR2-D, and corresponding mutations in a homologous ADAR protein.
356. A polynucleotide encoding the engineered adenosine deaminase of any one of statements 347-355, or a catalytic domain thereof.
357. A vector comprising the polynucleotide of statement 356.
358. A pharmaceutical composition comprising the engineered adenosine deaminase of any one of statements 347-355 or a catalytic domain thereof formulated for delivery by liposomes, nanoparticles, exosomes, microvesicles, nucleic acid nanoassemblies, a gene gun, or an implantable device.
359. An engineered cell expressing the engineered adenosine deaminase of any one of any one of statements 347-355 or a catalytic domain thereof.
360. The engineered cell of statement 359, wherein the cell transiently expresses the engineered adenosine deaminase or the catalytic domain thereof.
361. The engineered cell of statement 359 or 360, wherein the cell non-transiently expresses the engineered adenosine deaminase or the catalytic domain thereof.
362. An engineered, non-naturally occurring system for modifying nucleotides in a target nucleic acid, comprising: a) a dead CRISPR-Cas or CRISPR-Cas nickase protein, or a nucleotide sequence encoding said dead Cas or Cas nickase protein; b) a guide molecule comprising a guide sequence that hybridizes to a target sequence and designed to form a complex with the dead CRISPR-Cas or CRISPR-Cas nickase protein; and c) a nucleotide deaminase protein or catalytic domain thereof, or a nucleotide sequence encoding said nucleotide deaminase protein or catalytic domain thereof, wherein said nucleotide deaminase protein or catalytic domain thereof is covalently or non-covalently linked to said dead CRISPR-Cas or CRISPR-Cas nickase protein or said guide molecule is adapted to link thereof after delivery.
363. The system of statement 362, wherein said adenosine deaminase protein or catalytic domain thereof comprises one or more of the mutations: E488Q, V351G, S486A, T375S, S370C, P462A, N597I, L332I, I398V, K350I, M383L, D619G, S582T, V440I, S495N, K418E, S661T based on amino acid sequence positions of hADAR2-D, and corresponding mutations in a homologous ADAR protein.
364. The system of statement 362 or 363, wherein said adenosine deaminase protein or catalytic domain thereof comprises mutations: E488Q, V351G, S486A, T375S, S370C, P462A, N597I, L332I, I398V, K350I, M383L, D619G, S582T, V440I, S495N, K418E, and S661T based on amino acid sequence positions of hADAR2-D, and corresponding mutations in a homologous ADAR protein.
365. The system of any one of statements 362 to 364, wherein the CRISPR-Cas protein is Cas9, Cas12, Cas13, Cas 14, CasX, CasY.
366. The system of any one of statements 362 to 365, wherein the CRISPR-Cas protein is Cas13b.
367. The system of any one of statements 362 to 366, wherein the CRISPR-Cas protein is Cas13b-t1, Cas13b-t2, or Cas13b-t3.
368. The system of any one of statements 362 to 367, wherein the CRISPR-Cas is an engineered CRISPR-Cas protein of any one of statements 1 to 318.
369. A method for modifying nucleotide in a target nucleic acid, comprising: delivering to said target nucleic acid the engineered adenosine deaminase of any one of statements 347-355, or the system of any one of statements 362-368, wherein the deaminase deaminates a nucleotide at one or more target loci on the target nucleic acid.
370. The method of statement 369, wherein said nucleotide deaminase protein or catalytic domain thereof has been modified to increase activity against a DNA-RNA heteroduplex.
371. The method of statement 369 or 370, wherein said nucleotide deaminase protein or catalytic domain thereof has been modified to reduce off-target effects.
372. The method of any one of statements 369 to 371, wherein the target nucleic acid is within a cell.
373. The method of statement 372, wherein said cell is a eukaryotic cell.
374. The method of statement 372 or 373, wherein said cell is a non-human animal cell.
375. The method of any one of statements 372 to 374, wherein said cell is a human cell.
376. The method of any one of statements 372 to 375, wherein said cell is a plant cell.
377. The method of any one of statements 369 to 376, wherein said target nucleic acid is within an animal.
378. The method of any one of statements 369 to 377, wherein said target nucleic acid is within a plant.
379. The method of any one of statements 369 to 378, wherein said target nucleic acid is comprised in a DNA molecule in vitro.
380. The method of any one of statements 369 to 379, wherein the engineered adenosine deaminase, or one or more components of the system are delivered to the cell as a ribonucleoprotein complex.
381. The method of statement 380, wherein the engineered adenosine deaminase, or one or more components of the system are delivered via one or more particles, one or more vesicles, or one or more viral vectors.
382. The method of statement 381, wherein said one or more particles comprise a lipid, a sugar, a metal or a protein.
383. The method of statement 381 or 382, wherein said one or more particles comprise lipid nanoparticles.
384. The method of any one of statements 381 to 383, wherein said one or more vesicles comprise exosomes or liposomes.
385. The method of any one of statements 381 to 384, wherein said one or more viral vectors comprise one or more adenoviral vectors, one or more lentiviral vectors, or one or more adeno-associated viral vectors.
386. The method of any one of statements 369 to 385, where said method modifies a cell, a cell line or an organism by manipulation of one or more target sequences at genomic loci of interest.
387. The method of statement 386, wherein said deamination of said nucleotide at said target locus of interest remedies a disease caused by a G→A or C→T point mutation or a pathogenic SNP.
388. The method of statement 387, wherein said disease is selected from cancer, haemophilia, beta-thalassemia, Marfan syndrome and Wiskott-Aldrich syndrome.
389. The method of statement 386, 387, or 388, wherein said deamination of said nucleotide at said target locus of interest remedies a disease caused by a T→C or A→G point mutation or a pathogenic SNP.
390. The method of statement 389, wherein said deamination of said nucleotide at said target locus of interest inactivates a target gene at said target locus.
391. The method of any one of statements 380 to 390, wherein the engineered adenosine deaminase, or one or more components of the system are delivered by liposomes, nanoparticles, exosomes, microvesicles, nucleic acid nanoassemblies, a gene gun, an implantable device, or the vector system of statement 302.
392. The method of any one of statements 369 to 392, wherein modification of the nucleotide modifies gene product encoded at the target locus or expression of the gene product.
393. The engineered adenosine deaminase of any one of statements 347-355 or the system of any one of statements 362-368, wherein the adenosine protein or catalytic domain thereof comprises a mutation on S375 based on amino acid sequence positions of hADAR2-D, and a corresponding mutation in a homologous ADAR protein.
394. The engineered adenosine deaminase or the system of statement 393, wherein the mutation on S375 is S375N.
395. The use of the engineered CRISPR-Cas protein or engineered adenosine deaminase of any one of the preceding statements for the preparation of a medicament for the treatment of a disease.
396. A pharmaceutical formulation comprising the engineered CRISPR-Cas protein or engineered adenosine deaminase of any one of the preceding statements for use as a medicament.

[1193] The invention is further described in the following examples, which do not limit the scope of the invention described in the claims.

### EXAMPLES

### Example 1—Crystal Structure of Cas13b in Complex with crRNA

### Methods

### Protein Purification for Crystallization

[1194] PbuCas13b was expressed in a pET28 based vector with a twin-strep-sumo tag fused at the N-terminal in chemically competent BL21 DE3 cells purchased from New England Biolabs. Cells with the expression plasmid were grown at 37 degrees to OD 0.2 then the temperature was switched to 21 degrees. Growth was continued until OD 0.6 then induced with 5 μM IPTG. Cultures were grown for 18-20 hours, and then cells were harvested by centrifugation at 5,000 rpm and frozen at −80° C. Frozen cell paste was homogenized in Buffer A (500 mM Sodium Chloride, 50 mM Hepes pH 7.5, 2 mM DTT) supplemented with benzonase and lysozyme. The cells were broken by two passes through a microfluidizer at 20,000 psi and cell debris were separated from the soluble fraction by centrifugation at 10,000 rpm. The soluble fraction was passed through Streptactin resin (GE life sciences) and washed with 10 column volumes of Buffer A, followed by 10 column volume of wash buffer (1 M Sodium chloride, 50 mM Hepes 7.5, 2 mM DTT), and finally by 10 column volumes of Cleavage Buffer (400 mM Sodium Chloride, 20 mM Hepes 7.5, 2 mM DTT). PbuCas13b was eluted from the resin by addition of 5 mM desthiobiotin (Sigma), then cleaved overnight by sumo protease after being supplemented with 20 mM DTT. After cleavage the protein was passed through a Heparin column, concentrated to 500 μL and passed over a superdex 200 column (GE life sciences) equilibrated in storage buffer (500 mM Sodium Chloride, 10 mM Hepes pH 7.0, 2 mM DTT). Peak fractions were pooled and concentrated to at least 20 mg/ml. Seleno-methionine protein was similarly purified except with 5 mM DTT being supplemented in each buffer. Protein was quantified using Pierce reagent (Thermo).

### Crystallization and Data Collection

[1195] RNA substrate was added to PbuCas13b protein at 2:1 molar ratio and dialyzed for 7 hours against dialysis buffer (50 mM Sodium Chloride, 10 mM Hepes 7.0, 2 mM TCEP). Complexed PbuCas13b+RNA were diluted to 10 mg/ml with dialysis buffer and set up at 20 degrees by hanging drop vapor diffusion against 165 mM Sodium Citrate pH 4.6, 5.5% PEG6000, and 2 mM TCEP at varying drop ratios. Rod shaped crystals grew overnight and reached full size in 1-2 months. Crystals were transferred from the drop to cryo stabilization buffer (140 mM Sodium Citrate pH 4.6, 5% PEG6000, 35% PEG400), soaked for up to 24 hours, then flash frozen in liquid nitrogen. Selenium crystals for phasing were grown in similar conditions supplemented with 5 mM TCEP.

[1196] Native diffraction data from crystals of PbuCas13b and guide RNA were collected at the Advanced Photon Source, Argonne National Labs on beamlines 23-ID-BID, and anomalous data at the Diamond light source on beamline 104. A small beam was used, either collimated (23-ID) or focused (Diamond) to 20 microns, and multiple datasets were collected along the length of the crystal. Anomalous datasets were collected at 0.97934 (peak), 0.97958 (inflection) and 0.97204 (remote) angstrom wavelengths. Diffraction data were processed using XDS (1, 2) and scaled in aimless (3) implemented in autoPROC toolbox (4). The statistics are summarized in Table 10 below.

TABLE 10

| Data name | PbuCas13b-Se-peak | | PbuCas13b-Se-inflection | | PbuCas13b-Se-remote | | PbuCas13b-native | |
|---|---|---|---|---|---|---|---|---|
| Ligand in the structure | Citrate | | Citrate | | Citrate | | Citrate | |
| Data collection | | | | | | | | |
| Space group | P2₁2₁2₁ | | P2₁2₁2₁ | | P2₁2₁2₁ | | P2₁2₁2₁ | |
| Cell dimensions | | | | | | | | |
| a, b, c (Å) | 90.82, 124.65, 140.73 | | 90.86 124.72 140.77 | | 90.88, 124.76, 140.79 | | 90.86, 125.03, 140.57 | |
| α, β, γ (°) | 90, 90, 90 | | 90, 90, 90 | | 90, 90, 90 | | 90, 90, 90 | |
| Wavelength (Å) | 0.97934 | | 0.97958 | | 0.97204 | | 1.03320 | |
| Resolution (Å) | 140.73-2.32 | (2.47-2.32)* | 140.77-2.35 | (2.53-2.35)* | 140.79-2.40 | (2.62-2.40)* | 93.42-1.97 | (2.07-1.97)* |
| Unique reflections | 59325 | | 55600 | | 50274 | | 111373 | |
| R_{sym} | 0.203 | (1.732)* | 0.207 | (1.688)* | 0.214 | (1.741)* | 0.245 | (2.754)* |
| I/σ(I) | 10.2 | (1.4)* | 10.4 | (1.5)* | 10.1 | (1.5)* | 10.4 | (1.8)* |
| CC1/2 | 0.996 | (0.7)* | 0.996 | (0.710)* | 0.996 | (0.706)* | 0.995 | (0.572)* |
| Completeness (%) | 94.2 | (55.8)* | 94.0 | (56.6)* | 93.8 | (52.0)* | 97.8 | (99.2) |
| Redundancy | 13.6 | (12.3)* | 13.5 | (12.5)* | 13.5 | (12.7)* | 13.3 | (14.1)* |
| Refinement | | | | | | | | |

| | |
|---|---|
| R_{work}/R_{free}** | 0.1700/0.2023 |
| No. atoms | |
| Protein | 9111 |
| Ligands | 41 |
| Water | 657 |
| B-factors (Å²) | |
| Protein | 39.06 |
| Ligands | 58.91 |
| Water | 40.20 |
| R.m.s deviations | |
| Bond lenghts (Å) | 0.005 |
| Bond angles (°) | 0.742 |
| Ramachandran analysis^{#} (%) | |
| Favored | 97.01 |
| Allowed | 2.70 |
| Outliers | 0.29 |

*Highest resolution shell is shown in parenthesis.
**Rfree was calculated with 5% of the data.
^{#}Distribution of dihedral angles in Ramachandran diagram were calculated with MolProbity program (1).

Reference: 1. V. B. Chen et al., MolProbity: all-atom structure validation for macromolecular crystallography. Acta Crystallographica Section D-Biological Crystallography 66, 12-21 (2010).

### Structure Solution

[1197] The crystal structure of PbuCas13b was solved by multiwavelength anomalous diffraction (MAD) using selenium as anomalous scattering. The position of 27 SeMet sites were determined and refined using phenix.autosol (5, 6). A partial model was built by phenix.autobuild (7) using a 3.5 Å resolution experimental map with a figure of merit of 0.35. Cycles of manual rebuilding in Coot (8, 9) and refinement in phenix.refine (10-12) were done using the selenium experimental map. R-free flags and experimental phases were transferred from the selenium data to high-resolution native data using reflection file editor in PHENIX. These reflections were used for further cycles of rebuilding in Coot and refinement in phenix.refine. Anomalous difference maps were used to ensure correct registry. Refinement in phenix.refine used TLS (translation, libration, and screw), and positional and individual B-factor refinement. Citrate restrains were generated by phenix.elbow (13). The final model contains one polypeptide chain, one RNA nucleotide chain, two citrates molecules, one tetraethylene glycol (PG4) molecule, two Cl atoms, and 657 water molecules. Figures were created with PyMol Software (14).

### Structure Analysis

[1198] RNA structure was analyzed using DSSR (15). Protein conservation mapping to the structure was done using the Consurf server (16). Protein secondary structure was analyzed using the PDBSUM webserver (17). APBS as part of the PyMol visualization program was used to calculate electrostatics (18).

### Protein Alignment

[1199] Alignments of Cas13b enzymes were done using ClustalW or Muscle as implemented in Geneious(19). Neighbor-joining trees were generated using a Jukes-Cantor distance model. Conservation alignments for structure analysis were done on a tree subgroup that successfully matched HEPN domain active site residues to other family members (FIGS. 14-16).

### Gel Filtration Experiments

[1200] Formation of guide complex: 100 μg of PbuCas13b was incubated with two molar equivalents of guide RNA for 20 minutes at room temperature, in 100 μL of buffer (125 mM NaCl, 10 mM HEPES pH 7.0, 2 mM TCEP). Formation of guide-target complex: 100 μg of PbuCas13b and two molar equivalents of guide RNA were incubated together for 20 minutes as above. Two molar equivalents of target RNA were then added to the solution and the mixture was incubated at room temperature for an additional 20 minutes (100 μL total, 125 mM NaCl, 10 mM HEPES pH 7.0, 2 mM TCEP). Apo protein was similarly diluted to 1 μg/μL in a buffer solution of 125 mM NaCl, 10 mM HEPES pH 7.0, 2 mM TCEP. Samples were injected from a 2 mL capillary loop onto an GE Superdex 200 Increase 10/300 GL column and run with 500 mM NaCl, 10 mM HEPES pH 7.0, 2 mM DTT buffer.

### ThermoFluor Melting Assay

[1201] Protocol was adapted from (20). Samples were prepared to a final volume of 20 with 1 μg of PbuCas13b (apo, guide, or guide-target complex, as prepared above) in a solution with a final concentration of 50 mM NaCl, 10 mM HEPES pH 7.0, 6.25×SYPRO™ Orange Dye. For MgCl2 cleavage and binding experiments, a final concentration of 6 mM Mg2+ was added to the buffer mix described. For control experiments with non-complementary RNA, 2 molar equivalents of RNA were incubated with the protein complex. Melting experiments were conducted in triplicate on a Roche LightCycler 480 II.

### Limited Proteolysis

[1202] 10 μg of PbuCas13b was incubated with crRNA or crRNA and target for 30 min at room temperature. 400 μg of protease (Trypsin, Chemotrypsin or Pepsin) was added and the mix was incubated for 5 min at 37 degrees celsius, then placed quickly on ice for 2 min before adding SDS loading buffer and running on a 4-12% acrylamide gel.

### Protein Expression and Purification of PbuCas13b Pre-crRNA Processing Mutants

[1203] Alanine mutants at each of the putative crRNA-processing catalytic residues were generated using PIPE-site-directed mutagenesis cloning from the TwinStrep-SUMO-PbuCas13b expression plasmid and transformed into BL21(DE3)pLysE E coli cells. For each mutant, 2 L of Terrific Broth media (12 g/L tryptone, 24 g/L yeast extract, 9.4 g/L K2HPO, 2.2 g/L KH2PO4), supplemented with 100 μg/mL ampicillin, was inoculated with 15 mL of overnight starter culture and grown until OD600 0.4-0.6. Protein expression was induced with the addition of 0.5 mM IPTG and carried out for 16 hours at 21° C. with 250 RPM shaking speed. Cells were collected by centrifugation at 5,000 RPM for 10 minutes and paste was directly used for protein purification (10-20 g total cell paste). For Lysis, bacterial paste was resuspended via stirring at 4° C. in 50 mL of lysis buffer (50 mM Tris-HCl pH 7.5, 500 mM NaCl, 1 mM DTT) supplemented with 50 mg Lysozyme, 1 tablet of protease inhibitors (cOmplete, EDTA-free, Roche Diagnostics Corporation) and 500 U of Benzonase (Sigma). The suspension was passed through a LM20 microfluidizer at 25,000 psi and lysate cleared by centrifugation at 10,000 RPM, 4° C. for 1 hour. Lysate was incubated with 2 mL of StrepTactin superflow resin (Qiagen) for 2 hours at 4° C. on a rotary shaker. Resin bound with protein was washed three times with 10 mL of lysis buffer, followed by addition of 50 μL SUMO protease (inhouse) in 20 mL of IGEPAL lysis buffer (0.2% IGEPAL). Cleavage of the SUMO tag and release of native protein was carried out overnight at 4° C. in Econo-column chromatography column under gentle mixing on a table shaker. Cleaved protein was collected as flow-through, washed three times with 5 mL of lysis buffer and checked on a SDS-PAGE gel.

[1204] Protein was diluted two-fold with ion exchange buffer A containing no salt (50 mM Tris-HCl pH 7.5, 1 mM DTT) to get the starting NaCl concentration of 250 mM. Protein was then loaded onto a 5 mL Heparin HP column (GE Healthcare Life Sciences) and eluted over a NaCl gradient from 250 mM to 1 M. Fraction of eluted protein (at roughly 700 mM) were analyzed by SDS-PAGE gel and coomassie staining, pooled and concentrated to 1 mL using 50 MWCO centrifugal filters (Amicon). Concentrated protein was loaded onto a pre-equilibrated size exclusion column and eluted using S200 buffer containing 50 mM Tris-HCl pH 7.5, 500 mM NaCl, 2 mM DTT. Monodisperse protein fractions were analyzed by SDS-PAGE gel and coomassie staining, following by concentrating and buffer exchange into protein storage buffer (600 mM NaCl, 50 mM Tris-HCl pH 7.5, 1 mM DTT).

### Pre-crRNA Processing Assays

[1205] RNA for pre-crRNA processing and nuclease assays were ordered as Ultramers (IDT) and in vitro transcribed using the HiScribe T7 Quick High Yield RNA Synthesis kit (New England Biolabs). RNA was purified with AmpureXP RNA clean up beads and stored at −20° C. for further use. For testing pre-crRNA processing, WT and mutant protein were incubated with pre-crRNA at four times molar excess of protein relative to the RNA. Pre-crRNA processing was carried out in Cas13b crRNA processing buffer (10 mM TrisHCl pH 7.5, 50 mM NaCl, 0.5 mM MgCl2, 20U SUPERase in (ThermoFisher Scientific), 0.1% BSA) for 30 minutes at 37° C., stopped by adding 2×TBE-Urea gel loading buffer and denatured for 5 minutes at 95° C. Samples were immediately put on ice for 10 minutes before running them on an 15% TBE-Urea gel in 1×TBE buffer at 200 V for 40 minutes. Gel staining was carried out in 1×Sybr Gold in 1×TBE for 15 minutes and imaged on a BioRad gel doc system.

### Fluorescent Collateral RNA-Cleavage Assay for Pre-crRNA Mutants

[1206] Detection assays were carried out as quadruplicates with equimolar ratios of PbuCas13b or PbuCas13b mutants, crRNA and RNA target, in nuclease assay buffer (20 mM HEPES, 60 mM NaCl, 6 mM MgCl2, pH 6.8) with 0.5 μL murine RNase inhibitor (New England Biolabs) and 125 nM of poly-U homopolymer RNA sensor (Trilink). Samples were incubated for 3 hours at 37° C. on a fluorescent plate reader equipped with a FAM filter set. Measurements were recorded at 5-minute intervals and data normalized to the first time-point.

### Cleavage Fragment Library

[1207] To map Cas13 cleavage products, in vitro cleavage reactions were performed as described above with LwCas13a and PbuCas13b, their respective crRNAs and target RNA or control. Cleavage was carried out for 5 or 30 minutes and purified using an RNA oligo clean and concentrator kit (Zymo research). Small RNA sequencing libraries were prepared according to the NEB Multiplex Small RNA sequencing kit sequenced on an Illumina NextSeq 500 instrument.

### Design and Cloning of Mammalian Constructs for RNA Editing

[1208] PguCas13b was made catalytically inactive (dPguCas13b) by mutating two arginine and two histidine residues in the catalytic sites of the HEPN domains to alanines (R146A/H151A/R1116A/H1121A). These catalytically inactivated Cas13bs were Gibson cloned into pcDNA-CMV vector backbones containing the deaminase domain of ADAR2 (E488Q) fused to the C terminal end of the Cas13b via a GS linker (21). To generate truncated versions, primers were designed to PCR amplify the dCas13b that truncated off 60 bp (20 amino acids) progressively up to 900 bp off of the C terminal end (15 truncations in total), and these truncated Cas13b genes were Gibson cloned into the pcDNA-CMV-ADAR2 backbone described above. Guide RNAs targeting Cluc were cloned using golden gate cloning into a mammalian expression vector containing the direct repeat sequence for this ortholog at the 3′ end of the spacer sequence destination site, under the U6 promoter.

[1209] The luciferase reporter used was a CMV-Cluc (W85X) EF1alpha-Gluc dual luciferase reporter used by Cox et. al. (2017) to measure RNA editing (21). This reporter vector expresses functional Gluc as a normalization control, but a defective Cluc due to the addition of the W85X pretermination site.

### Mammalian Cell Culture

[1210] Mammalian cell culture experiments were performed in the HEK293FT line (American Type Culture Collection (ATCC)), which was grown in Dulbecco's Modified Eagle Medium with high glucose, sodium pyruvate, and GlutaMAX (Thermo Fisher Scientific), additionally supplemented with 1× penicillin—streptomycin (Thermo Fisher Scientific) and 10% fetal bovine serum (VWR Seradigm).

[1211] All transfections were performed with Lipofectamine 2000 (Thermo Fisher Scientific) in 96-well plates. Cells were plated at approximately 20,000 cells/well 16-18 hours prior to transfection to ensure 90% confluency at the time of transfection. For each well on the plate, transfection plasmids were combined with Opti-MEM I Reduced Serum Medium (Thermo Fisher) to a total of 25 μl. Separately, 24.5 μl of Opti-MEM was combined with 0.5 μl of Lipofectamine 2000. Plasmid and Lipofectamine solutions were then mixed and pipetted onto cells.

### RNA Knockdown in Mammalian Cells

[1212] To assess RNA targeting in mammalian cells with reporter constructs, 150 ng of Cas13 construct was co-transfected with 300 ng of guide expression plasmid and 45 ng of the dual luciferase reporter construct. 48 hours post-transfection, media containing secreted luciferase was harvested, and measured for activity with BioLux Cypridinia and Biolux Gaussia luciferase assay kits (New England Biolabs) on a plate reader (Biotek Synergy H4) with an injection protocol. Signal from the targeted Gluc was normalized to signal from un-targeted Cluc, and subsequently, experiments with PbCas13b mutant luciferase signal were normalized to experiments with guide-only luciferase signal (the average of three bioreplicates). All replicates performed are biological replicates.

### REPAIR Editing in Mammalian Cells

[1213] To assess REPAIR activity in mammalian cells, Applicants transfected 150 ng of REPAIR vector, 300 ng of guide expression plasmid, and 45 ng of the RNA editing reporter. Applicants then harvested media with the secreted luciferase after 48 hours and diluted the media 1:10 in Dulbecco's phosphate buffered saline (PBS) (10 μl of media into 90 μl PBS). Applicants measured luciferase activity with BioLux Cypridinia and Biolux Gaussia luciferase assay kits (New England Biolabs) on a plate reader (Biotek Synergy Neo2) with an injection protocol. All replicates performed are biological replicates.

### REFERENCES

[1214] 1. W. Kabsch, Integration, scaling, space-group assignment and post-refinement. Acta Crystallogr D Biol Crystallogr 66, 133-144 (2010).
[1215] 2. W. Kabsch, Xds. Acta Crystallogr D Biol Crystallogr 66, 125-132 (2010).
[1216] 3. P. R. Evans, G. N. Murshudov, How good are my data and what is the resolution? Acta Crystallogr D Biol Crystallogr 69, 1204-1214 (2013).
[1217] 4. C. Vonrhein et al., Data processing and analysis with the autoPROC toolbox. Acta Crystallogr D Biol Crystallogr 67, 293-302 (2011).
[1218] 5. P. D. Adams et al., PHENIX: a comprehensive Python-based system for macromolecular structure solution. Acta Crystallogr D Biol Crystallogr 66, 213-221 (2010).
[1219] 6. T. C. Terwilliger et al., Decision-making in structure solution using Bayesian estimates of map quality: the PHENIX AutoSol wizard. Acta Crystallogr D Biol Crystallogr 65, 582-601 (2009).
[1220] 7. T. C. Terwilliger et al., Iterative model building, structure refinement and density modification with the PHENIX AutoBuild wizard. Acta Crystallogr D Biol Crystallogr 64, 61-69 (2008).
[1221] 8. P. Emsley, B. Lohkamp, W. G. Scott, K. Cowtan, Features and development of Coot. Acta Crystallogr D Biol Crystallogr 66, 486-501 (2010).
[1222] 9. P. Emsley, K. Cowtan, Coot: model-building tools for molecular graphics. Acta Crystallogr D Biol Crystallogr 60, 2126-2132 (2004).
[1223] 10. P. V. Afonine et al., Towards automated crystallographic structure refinement with phenix.refine. Acta Crystallogr D Biol Crystallogr 68, 352-367 (2012).
[1224] 11. N. Echols et al., Automated identification of elemental ions in macromolecular crystal structures. Acta Crystallogr D Biol Crystallogr 70, 1104-1114 (2014).
[1225] 12. P. H. Zwart et al., Automated structure solution with the PHENIX suite. Methods Mol Biol 426, 419-435 (2008).
[1226] 13. N. W. Moriarty, R. W. Grosse-Kunstleve, P. D. Adams, electronic Ligand Builder and Optimization Workbench (eLBOW): a tool for ligand coordinate and restraint generation. Acta Crystallogr D Biol Crystallogr 65, 1074-1080 (2009).
[1227] 14. The PyMOL Molecular Graphics System, Version 2.0 Schrödinger, LLC.
[1228] 15. X. J. Lu, H. J. Bussemaker, W. K. Olson, DSSR: an integrated software tool for dissecting the spatial structure of RNA. Nucleic Acids Res 43, e142 (2015).
[1229] 16. H. Ashkenazy et al., ConSurf 2016: an improved methodology to estimate and visualize evolutionary conservation in macromolecules. Nucleic Acids Res 44, W344-350 (2016).
[1230] 17. T. A. de Beer, K. Berka, J. M. Thornton, R. A. Laskowski, PDBsum additions. Nucleic Acids Res 42, D292-296 (2014).
[1231] 18. E. Jurrus et al., Improvements to the APBS biomolecular solvation software suite. Protein Sci 27, 112-128 (2018).
[1232] 19. L. A. Ripma, M. G. Simpson, K. Hasenstab-Lehman, Geneious! Simplified genome skimming methods for phylogenetic systematic studies: A case study in Oreocarya (Boraginaceae). Appl Plant Sci 2, (2014).
[1233] 20. K. Huynh, C. L. Partch, Analysis of protein stability and ligand interactions by thermal shift assay. Curr Protoc Protein Sci 79, 28 29 21-14 (2015).
[1234] 21. D. B. T. Cox et al., RNA editing with CRISPR-Cas13. Science 358, 1019-1027 (2017).

### Results

[1235] Type VI CRISPR-Cas systems contain programmable single-effector RNA-guided RNases, including Cas13b, one of the four known type VI subtype family members. Cas13b is unique among these protein families in its linear domain architecture and CRISPR RNA (crRNA) structure. Applicants report the crystal structure of Prevotella buccae Cas13b (PbuCas13b) bound to crRNA at 1.97 angstrom resolution. The structure reveals that the guide RNA was coordinated within Cas13b by a network of direct and indirect interactions that mediated nuclease activity. Applicants identified a second active site for crRNA processing and show that mutation of key residues in this site abrogates processing activity. Applicants also found the HEPN2 nuclease domain was non-essential for RNA targeting and established a basis for structure-guided engineering of RNA targeting with Cas13b.

[1236] Here Applicants report the structure of Cas13b from Prevotella buccae (PbuCas13b) in complex with a crRNA handle and partial spacer at 1.97 angstrom resolution. Our structure revealed the overall architecture of Cas13b nucleases and the molecular basis for crRNA recognition and cleavage.

[1237] Applicants solved the crystal structure of PbuCas13b complexed with a 36-nucleotide direct repeat sequence and a short 5-nucleotide spacer (FIG. 1). Similar to other Class 2 CRISPR effectors, the overall shape of PbuCas13b is bilobed (13-19). Five domains are apparent within the structure: two HEPN domains (HEPN1 and HEPN2), two predominantly helical domains (Helical-1 and Helical-2), and a domain that caps the 3′ end of the crRNA with two beta hairpins (Lid domain) (FIG. 1, FIG. 18). To identify similarities to other domains in the protein data bank, the complete PbuCas13b structure as well as isolated domains were queried using the DALI server (15). HEPN1 matched to the HEPN2 domain of LshCas13a.

[1238] Both HEPN domains were largely alpha helical: HEPN1 was made of twelve linearly connected α-helices with flexible loops in between the helices. HEPN2 was composed of nine α-helices, several short β-strands, and a β-hairpin with charged residues at the tip, which pointed towards the active site pocket. HEPN2 rested on HEPN1 such that the active site residues (R156, N157, H161 and R1068, N1069, H1073) were assembled into a canonical HEPN active site, despite being at the N- and C-terminal extremities of the linear protein (FIG. 1) (3, 17, 18, 20). The HEPN1 domain was connected to the Helical-1 domain by a highly conserved inter-domain linker (IDL) that reached across the center of a large, positively charged inner channel (FIG. 1). Mutation of conserved residues of the IDL (R285, K292, E296) to alanine reduces the ability of PbuCas13b to interfere with luciferase expression in mammalian cells by cleaving luciferase mRNA, demonstrating a role in general nuclease activity (FIGS. 5A,C).

[1239] Helical-1 was broken up linearly into three segments by the Helical-2 and Lid domains. Helical-1 made extensive sugar-phosphate and nucleobase contacted with the direct repeat RNA (FIG. 2, FIG. 3). Helical-1 also made minor interface contacts with both HEPN1/2 and the Lid domains. The Lid domain was mixed α and β secondary structure and caps the 3′ free end of the direct repeat RNA with two charged β-hairpins. The longer of the two β-hairpins reached across the RNA loop to contact the Helical-1 domain, forming a lid over the free RNA ends. Positively charged residues from the Lid domain pointed into a large central channel running through the center of the protein complex (FIG. 1, FIG. 6C). A positively charged side channel penetrating from the outer solvent to the inner channel was formed between a disordered loop (K431 to T438) of the Lid domain and the two HEPN domains (FIG. 6A). The Helical-2 domain was made of eleven α-helices and wrapped under the body of the direct repeat RNA via its connection to Helical-1. Helical-2 interfaced extensively with the HEPN1 domain and made minor contacts with the extended β-hairpin of the Lid domain. A second positively charged side channel was between Helical-1 and Helical-2, providing bulk solvent accessibility to the crRNA (FIG. 6B). All domains, the IDL, and the crRNA formed the large central channel, the inside of which was lined with positively charged residues (FIG. 6C).

[1240] Nuclease-dead Cas13b fused to an ADAR deaminase domain was used for REPAIR to achieve targeted RNA base editing (11). AAV-mediated delivery is commonly used for gene therapies, but REPAIR exceeds the size limit of AAV's cargo capacity (11, 21). Applicants showed previously that C-terminal truncations of Prevotella sp. P5-125 (PspCas13b) did not decrease REPAIR activity. Applicants further used another ortholog of Cas13b, from Porphyromonas gulae (PguCas13b), which was stably expressed and showed high activity in mammalian cells, in contrast to PbuCas13b (11). Based on alignments between PbuCas13b and PguCas13b, Applicants made truncations to remove the HEPN2 domain, fused it to ADAR, and tested its ability to carry out base editing with the REPAIR system. Surprisingly, not only did these truncated mutants retain RNA targeting, some were significantly more efficient at RNA editing (FIG. 7).

[1241] Cas13b has been shown to function efficiently in REPAIR with crRNAs of various lengths, with spacers ranging from 30 to 84 nucleotides (11). Unambiguous density for all RNA bases enabled complete model building of the direct repeat RNA. The structure revealed Cas13b recognized the direct repeat by extensive sugar-phosphate and nucleobase interactions (FIGS. 2 and 3). The direct repeat was mostly buried between the two Helical domains and the Lid domain but protruded slightly from Helical-1, explaining how Cas13b was able to utilize an alternate, longer crRNA. The overall crRNA structure was a deformed A-form duplex comprising a stem (bases G(−1)-G(−4), C(−33)-C(−36)), loop (C(−5)-U(−8), A(−29)-A(−32)), stem (U(−9)-U(−14), A(−23)-A(−28)), bulge (C(−15), G(−21)), and hairpin loop (U(−16)-U(−20)) architecture (FIGS. 2 and 3). Helical-1 and Helical-2 mediated direct and indirect recognition of the crRNA hairpin together with the Lid domain, which capsped the 3′ free end.

[1242] Three bases, C(−8), U(−20), and A(−29), were flipped out from the body of the RNA. The backbone carbonyl of T754 stabilized the flipped out, highly conserved C(−8) base by interacting with the base N4 amine, holding the base in a hydrophobic pocket of highly conserved residues (Y540, 566-571, K751, 753-761) in the Helical-1 and Helical-2 domains. The base flip was further stabilized by interaction between the C(−8) N3′ and the sugar (O2′) of U(−7). Changing C(−8) to G or U decreased nuclease activity, and destabilized the protein-RNA complex as measured in a thermal stability assay (FIG. 3). U(−20) was also absolutely conserved in Cas13b direct repeat sequences and was coordinated by completely conserved residues, most notably R762 which made contacts with the nucleobase O2, and R874 which intercalated between G(−21) and U(−20), holding the base out and making contacts with the U(−20) sugar O4′. Mutation of R762 to alanine dramatically reduced RNA interference in mammalian cells (FIG. 5A). Mutating U(−20) to G decreased nuclease activity (FIG. 3). In contrast to C(−8) and U(−20), A(−29) was not conserved in Cas13b direct repeat sequences and was the nucleobase was not coordinated by any amino acids. Instead, A(−29) engaged in multiplete base pairing with G(−26) and C(−11) (FIG. 8F) (22). A(−29) was tolerant to identity changes to any other base, but mutation to G slightly decreased general nuclease activity (FIG. 9). Base identity changes that affected general nuclease activity also decreased the thermal stability of the Cas13+crRNA complex. Consistent with this observation, Applicants found that changing the wobble base pair between U(−27) and G(−10) to a Watson crick base pair increased general nuclease activity (FIG. 2D). However, changing A(−32) to G, which also created a Watson crick base pair, decreased stability and reduced RNase activity (FIG. 2D).

[1243] The hairpin loop was recognized by a network of protein interactions from highly conserved residues within the Helical-2 domain (FIG. 3). K870 coordinated with O4 from both U(−16) and U(−19), which indirectly flipped U(−17) into the solvent at the hairpin turn, with no visible residue contacts. W842 stacked with the nucleobase of U(−18) while also interacting with the phosphate backbone together with K846. R877 and E873 further stabilized U(−18) through interactions with base N3 and O2 positions. R874 and R762 stabilized the U20 position through sugar O4′ and base O2′ interactions, respectively.

[1244] The hairpin loop distal end of the crRNA (−1 to −4 and −33 to −36) was helical and recognized by a combination of base and backbone interactions (FIG. 3). Notably, N653 and N652 made critical minor groove direct contacts with U(−2) and C(−36) and coordinated the 5′ and 3′ ends of the hairpin. Disruption of these base identities or mutation of N653 or N652 to alanine substantially decreased Cas13b activity in vitro and in mammalian interference assays (FIG. 2E, FIG. 5). C(−33) was coordinated by N756 via the nucleobase O2 and sugar O2′, and changing this C to A or G abrogates general RNase activity and decreased protein stability (FIG. 2D, FIG. 9).

[1245] The RNA hairpin end (nucleotides −17 to −20) was stabilized by extensive phosphate backbone hydrogen bonding and base interactions (FIGS. 2, 3). Mutating U(−18) to G abolished general nuclease activity. The same was observed for U(−19), or U(−20) but other bases were tolerated, suggesting that the G O6 or N2 nucleobase atoms disrupted nuclease activity (FIG. 9).

[1246] The crystallized RNA substrate included five bases of a spacer sequence (U1-G5), though only the first nucleotide 5′ of the direct repeat was visible in the density. The 5′ end of the RNA direct repeat and the first base of the spacer was supported by residues from Helical-2 and pointing up into the central channel and towards the side channel between the Lid and HEPN domains (FIG. 3). U(1) was not coordinated by base specific contacts, but was in a net positively charged pocket in the Lid domain. Mutation of charged and aromatic amino acids nearby the spacer U(1) had little effect on general nuclease activity, suggesting the spacer RNA coordination by these residues is either not present or not essential (FIG. 5H).

[1247] Some Class ₂ CRISPR systems process long pre-crRNAs into mature crRNAs (3, 7, 11, 23). Cas13b has been shown to process its own crRNA at the 3′ end (3). A number of highly conserved residues are in contact with or nearby the 3′ end of the RNA and potentially form a second, non-HEPN nuclease site. To test for a second nuclease site, Applicants mutated four conserved residues nearby the 3′ RNA end and tested these mutants for crRNA processing and target-activated nuclease activity (FIG. 2). K393 when mutated to alanine abrogates RNA processing but retains targeted nuclease activity, confirming the location of a second nuclease site in the Lid domain responsible for crRNA processing (FIGS. 2, 6, 10). R482A slightly affected crRNA processing, but significantly affected general nuclease activity. This is likely due to the importance of stabilizing the crRNA (FIG. 2).

[1248] The resolved spacer nucleotides pointed toward the HEPN lobes and into the positively charged channel. However, the channel was not large enough to accommodate an RNA duplex, suggesting that Cas13b adopted an open conformation in response to target binding. Applicants measured changes in Cas13b conformation in apo, guide, and guide+target RNA complexes using a thermal denaturation assay. Target-bound Cas13b adopted a less stable conformation compared to guide-only Cas13b, but this change was not observed in the presence of non-target RNA (FIG. 11). Limited proteolysis gave similar results; guide+target bound complexes were less protease resistant than guide only complex (FIG. 12).

[1249] Although there was a single molecule in the asymmetric unit of the crystal, a loop from one monomer made trans contacts with the another, coordinating a bound citrate from the crystallization buffer in the active site. To test if the trans-subunit contact is functional, and whether PbuCas13b functions cooperatively in trans via this loop, Applicants mutated the residues at the tip of this loop (Q646 and N647) to see if they would affect activity. Mutations of each decreased RNA interference in mammalian cells, suggesting the possibility of trans-subunit regulation of general nuclease activity (FIG. 5F).

[1250] Lastly, Applicants compared Cas13b to the structure of LshCas13a (FIG. 4) (17). In addition to general functional similarities between these family members, there were structural similarities between nucleases especially in the HEPN domains and active site architecture (FIGS. 4B,C). However, a SAS search provided a match to the crystal structure of (previously referred to as LbCpf1) and highlighted a bridge helix like sub-domain within Cas13b (24). Although this domain was poorly conserved within the Cas13b family, it appeared to be a common structural feature with Cas12a that mediated essential nucleic acid contacts (FIGS. 5D, 13). Given the fundamental differences between Cas13b and Cas12a, Applicants postulated that the bridge helix arose convergently and did not indicate a common ancestor for these two proteins. Nonetheless, Applicants referred to this feature as the bridge helix for consistency with the nomenclature of other Class 2 effectors (1, 14).

[1251] Table 11 below lists exemplary PbCas13b mutants which were produced and tested.

TABLE 11
List of mutations tested for RNA interference.
List of mutations and averaged normalized fluorescent
values from three biological replicates.

| Mutation | Guide 1 normalized RLU | Guide 2 normalized RLU |
|---|---|---|
| R53A | 0.747858 | 0.618255 |
| R53K | 0.533437 | 0.415443 |
| R53D | 0.708809 | 0.656473 |
| R53E | 0.653859 | 0.505983 |
| Y164A | 0.560344 | 0.423418 |
| Y164F | 0.555361 | 0.419603 |
| Y164W | 0.578905 | 0.411809 |
| K183A | 0.611807 | 0.434156 |
| K193A | 0.637075 | 0.435537 |
| R285A | 0.621679 | 0.473138 |
| K292A | 0.709821 | 0.47966 |
| E296A | 0.753062 | 0.402674 |
| N297A | 0.697938 | 0.407599 |
| T405A | 0.668786 | 0.366621 |
| H407A | 0.541401 | 0.358297 |
| H407Y | 0.503637 | 0.335036 |
| H407W | 0.528546 | 0.359063 |
| H407F | 0.495551 | 0.341844 |
| K457A | 0.632984 | 0.441894 |
| H500A | 0.549885 | 0.34935 |
| K570A | 0.575468 | 0.362485 |
| K590A | 0.587262 | 0.383572 |
| R600A | 0.565624 | 0.417064 |
| K607A | 0.687397 | 0.430726 |
| R614A | 0.744806 | 0.450827 |
| N634A | 0.661617 | 0.386325 |
| R638A | 0.696471 | 0.410163 |
| Q646A | 0.675146 | 0.372062 |
| N647A | 0.677884 | 0.400227 |
| N652A | 0.665943 | 0.406755 |
| N653A | 0.650794 | 0.384887 |
| K655A | 0.900461 | 0.58631 |
| S658A | 0.625349 | 0.363679 |
| K741A | 0.648908 | 0.401644 |
| K744A | 0.651516 | 0.42232 |
| N756A | 0.650638 | 0.447333 |
| S757A | 0.618393 | 0.402225 |
| R762A | 0.862666 | 0.577076 |
| R791A | 0.644193 | 0.444169 |
| K826A | 0.600621 | 0.395086 |
| K828A | 0.619022 | 0.416127 |
| K829A | 0.593882 | 0.404272 |
| K846A | 0.576794 | 0.407463 |
| K857A | 0.595231 | 0.40528 |
| R877A | 0.683229 | 0.461362 |
| K943A | 0.573508 | 0.394379 |
| K943R | 0.60418 | 0.403167 |
| K943D | 0.69041 | 0.386955 |
| K943E | 0.702192 | 0.372508 |
| R1041A | 0.662393 | 0.371243 |
| R1041K | 0.629986 | 0.376016 |
| R1041D | 0.813623 | 0.680736 |
| R1041E | 0.842593 | 0.484389 |
| D397A | 0.63295 | 0.376658 |
| E398A | 0.557761 | 0.365275 |
| D399A | 0.590279 | 0.368724 |
| E400A | 0.560351 | 0.349016 |
| D434A | 0.524497 | 0.364659 |
| R618A | 0.611197 | 0.401871 |
| R830A | 0.663284 | 0.405163 |
| Q831A | 0.548391 | 0.351777 |
| K835A | 0.503864 | 0.373504 |
| K836A | 0.503571 | 0.374439 |
| R838A | 0.549749 | 0.372399 |
| WT | 0.563282 | 0.335038 |

[1252] The structure of PbuCas13b provided new information on the structural diversity of the type VI protein family and highlighted the differences and similarities between Cas13a and b. Applicants show the structural basis for crRNA recognition and processing and revealed key regulators of nuclease activity in both the guide RNA and protein. Based on the structure of PbuCas13b, Applicants were able to generate a smaller variant of the REPAIR platform that maintained base editing efficiency and could be packaged into AAV. Our data suggests a major domain reconfiguration occurs during target recognition. Insights from the structure of PbuCas13b enabled rational engineering to improve functionality for RNA targeting specificity, base editing, and nucleic acid detection (11, 12, 25, 26).

### Example 2

[1253] FIG. 19 shows a pymol file that shows a position of the coordinated nucleotide in the active site of Cas13b. This is a structural alignment based on a crystal structure of RNAseL in complex with U nucleotide. This alignment placed the nucleotide within the active site of Cas13b and revealed likely residue interactions. Loops involved in base specificity are annotated in the figure.

### Example 3

[1254] The RNA loop may be extended. The extended RNA guide loop may add functional RNA motifs. FIG. 20 shows an exemplary RNA loop extension.

### Example 4

[1255] FIG. 21 shows exemplary fusion points via which a nucleotide deaminase is linked to a Cas13b. The fusion points may be one or more amino acids on Cas13b. For example, the fusion points may be one or more of amino acids 411-429, 114-124, 197-241, and 607-624. In one example, the amino acids are in Prevotella buccae Cas13b.

### Example 5

[1256] Mutations in ADAR affecting ADAR activity were screened using yeast screening. The screen was performed in multiple rounds. Each round of screening yielded a set of candidate mutations. The candidate mutations were then validated in mammalian cells. The top-performing mutations were added to the last version of mutations and re-screened. The mutations screened in 10 rounds are shown in the table below. The mutant identified in round n was designated as “RESCUE vn-1.” As discussed herein RESCUE refer to mutations that convert adenosine deaminase activity to cytidine deaminase activity.

TABLE 12

| RESCUE | | |
|---|---|---|
| Round | ADAR mutations | Plasmid |
| RESCUEv0 | E488Q | pAB0048 |
| RESCUEv1 | E488Q, V351G | pAB0359 |
| RESCUEv2 | E488Q, V351G, S486A | pAB1188 |
| RESCUEv3 | E488Q, V351G, S486A, T375S | pAB0642 |
| RESCUEv4 | E488Q, V351G, S486A, T375S, S370C, | pAB1072 |
| RESCUEv5 | E488Q, V351G, S486A, T375S, S370C, | pAB1135 |
| | P462A | |
| RESCUEv6 | E488Q, V351G, S486A, T375S, S370C, | pAB1146 |
| | P462A, N597I | |
| RESCUEv7 | E488Q, V351G, S486A, T375S, S370C, | pAB1194 |
| | P462A, N597I, L332I | |
| RESCUEv8 | E488Q, V351G, S486A, T375S, S370C, | pAB1220 |
| | P462A, N597I, L332I, I398V | |
| RESCUEv9 | E488Q, V351G, S486A, T375S, S370C, | pAB1327 |
| | P462A, N597I, L332I, I398V, K350I | |

[1257] Screening for mutations for RESCUE v9 was performed (FIG. 22). Effects of RESCUEv9 were validated on T-flip guides (FIG. 23) and C-flip guides (FIG. 24). At least about 60% editing for T, A, and C motifs and 25% editing for the G motif were achieved with RESCUEv9. Performance of RESCUEv9 was tested with endogenous targeting (with T-flip guides) (FIG. 25).

[1258] Screening for mutations for RESCUE v10 was performed (FIG. 26).

[1259] 30-bp guides were tested for C-flips (FIG. 27).

[1260] Comparison between Cas13b6 and Cas13b12 with RESCUE v1 through v8 were performed. Gluc/Cluc results are shown in FIG. 28, fraction editing results are shown in FIG. 29, and effects on endogenous targeting (T-flips) with RESCUEv8 are shown in FIG. 30.

[1261] Effects of RESCUEs on base converting (C to U and A to I activities) were compared (FIG. 31). CCN 3′ motif targeting was tested (FIG. 32).

### Example 6

[1262] Constructs with various dead Cas13b (including dCas13b) fused with ADAR via a linker were generated (FIG. 33A) and tested (FIG. 33B). The constructs also had an N-terminal tag (HIVNES). Sequencing of the N-terminal tag and linkers were performed (FIG. 34).

[1263] Quantification of off-targets was performed (FIG. 35). Off-target edits were tested (FIG. 36). Endogenous genes targeted with (GGS)2/Q507R were tested (FIG. 37). The eGFP screening of mutations on (GGS)2/Q507R was performed (FIGS. 38 and 39).

[1264] Constructs with dCas13b that was Cas13b truncation were generated (FIG. 40A) and tested (FIG. 40B). The constructs also had an N-terminal tag (NES/NLS). Multiplexed on/off-target guides were generated for screening (FIG. 41).

### Example 7

[1265] Mutations in ADAR affecting ADAR activity were screened using yeast screening. The screen was performed in multiple rounds. Each round of screening yielded a set of candidate mutations. The candidate mutations were then validated in mammalian cells. The top-performing mutations were added to the last version of mutations and re-screened. The mutations screened in 10 rounds are shown in the table below. The mutant identified in round n was designated as “RESCUE vn-1.” As discussed herein RESCUE refer to mutations that convert adenosine deaminase activity to cytidine deaminase activity.

TABLE 13

| RESCUE | | |
|---|---|---|
| Round | ADAR mutations | Plasmid |
| RESCUEv0 | E488Q | pAB0048 |
| RESCUEv1 | E488Q, V351G | pAB0359 |
| RESCUEv2 | E488Q, V351G, S486A | pAB1188 |
| RESCUEv3 | E488Q, V351G, S486A, T375S | pAB0642 |
| RESCUEv4 | E488Q, V351G, S486A, T375S, S370C, | pAB1072 |
| RESCUEv5 | E488Q, V351G, S486A, T375S, S370C, | pAB1135 |
| | P462A | |
| RESCUEv6 | E488Q, V351G, S486A, T375S, S370C, | pAB1146 |
| | P462A, N597I | |
| RESCUEv7 | E488Q, V351G, S486A, T375S, S370C, | pAB1194 |
| | P462A, N597I, L332I | |
| RESCUEv8 | E488Q, V351G, S486A, T375S, S370C, | pAB1220 |
| | P462A, N597I, L332I, I398V | |
| RESCUEv9 | E488Q, V351G, S486A, T375S, S370C, | pAB1327 |
| | P462A, N597I, L332I, I398V, K350I | |
| RESCUEv10 | E488Q, V351G, S486A, T375S, S370C, | pAB1411 |
| | P462A, N597I, L332I, I398V, K350I, | |
| | M383L | |

[1266] Multiple rounds of validation of RESCUEv10 were performed (FIGS. 42A-42E). RESCUEv10 was analyzed by next generation sequencing (NGS) (FIG. 43). Mutations that improve specificity were identified (FIG. 44). Effects of RESCUE on endogenous targeting (C-flips and T-flips) were tested (FIG. 45).

[1267] RESCUES were used for targeting β-catenin. FIG. 46 shows targeting β-catenin using RESCUE v6 and v9. FIG. 47 shows new β-catenin secreted Gluc/Cluc reporter. FIG. 48 shows results of targeting β-catenin by RESCUEv10.

[1268] RESCUE may also be used for targeting other genes. FIG. 49 shows targeting ApoE4 by RESCUEv10.

### Example 8

[1269] This example shows based editing β-catenin to increase stability of β-catenin using RESCUE to improve proliferation and survival of HUVECs in a nutrient deficient medium.

[1270] HUVECs are grown in a nutrient rich medium. Cells are transformed with adenovirus containing RESCUE constructs. The RESCUE targets β-catenin and generate S37A mutation. The transformed cells are passed at low confluence into a nutrient deficient medium. Cell proliferation and survival rate are measured using a cell-counting kit.

### Example 9

[1271] This example shows based editing serine protease PCSK9 in HepG2 cells. The base editing modulates low density lipoprotein (LDL) cholesterol update in HepG2 cells by inducing patient-derived mutations on PCSK9.

[1272] A GFP expression construct is transfected to HepG2 using various transfection reagents. The optimal transfection reagent resulting the best GFP expression is selected for transfecting RESCUE constructs. RESCUE constructs are transfected using 30 bp guides with target site at 5′ 5, 7, 9, 11. One or more mutations in PCSK9 are generated by RESCUE. Exemplary mutations are shown in FIG. 50.

[1273] RT-PCR and sequencing are performed to identify the best-performing guides. Cytosolic LDL are fluorescently labeled and cellular update of cytosolic LDL is measured by cell imaging. PCSK9 secretion is monitored using ELISA and/or immunoprecipitation.

### Example 10

[1274] This example lists information and data related to Cas13b-t. The respective sizes of Cas13b-t1, Cas13b-t2, and Cas13b-t3 are listed in Table 14.

TABLE 14

| Naming Key | Size |
|---|---|
| Cas13b-t1 | 804 aa |
| Cas13b-t2 | 802 aa |
| Cas13b-t3 | 775 aa |

[1275] Amino acid sequences of Cas13b-t1, Cas13b-t2, and Cas13b-t3 are shown below:

Cas13b-t1
(SEQ ID NO: 272)
mndkstwqlklhrivrwsflrrqrvgcdishhfdfilvrrsgiknmefen
ikktsnkevysiegyegekkwcfaivlnraqtnleenpklfeqtltrfek
imkqdwfneetkkliyekeeenkvkeeiqiaaserlknlrnyfshylhap
dclifnrndtiriimekayeksrfeakkkqqedisiefpelfeeedkits
agvvffvsffierrflnrlmgyvqgfrktegeynitrqvfskyclkdsys
vqaqdhdavmfrdilgylsrvpteiyqhikltrkrsqdqlserktdkfil
falkyledyglkdladytacfarskikrenedtketdgnkhkfhrekpvv
eihfdkekqdqfyikrnnvilkaqkkggqsnyfrmgvyelkylvllsllg
kaeeaiqridryisslkkqlpyldkisneeiqksinflprfvrsrlgllq
vddekrlktrleyvkakwtdkkegsrklelhrkgrdilryinercdrpls
rkeynnilkfivnkdfagfyneleelkrtrrldkniiqklsghttlnalh
ervcdlvlqelgslqsenlkeyiglipkeekevtfrekvdrileqpvvyk
gflryeffkedkksfarlveeaiktkwsdfdiplgeeyynipsldrfdrt
nkklyetlamdrlclmmarqyylrlneklaekaqhiywkkedgreviifk
fqnpkeqkksfsirfsildytkmyvmddpeflsrlweyfipkeakeidyh
khyarafdkytnlqkegidailklegriierrkikpaknyiefqeimnrs
gynndqqvalkrvrnallhynlnferehlkrfygyvkregiekkwsliv
Cas13b-t2
(SEQ ID NO: 273)
mqvenikkgssqgmysiegyegakkwcfaivlnraqtnlqgnpklfeetl
trferirkedwfdqetkkliyakqeqneveeeiqkaadeklrdlrnyfsh
yfhtpdcliftqndpvriimekayekarfeqakkeqedisiefgelfeen
gritsagvvffasffaerrflnrlmgyvqgftrtegeykitrdvfstycl
rdsysvktpdhdavmfrdilgylsrvpsesyqrikesqmrsetqlserkt
dkfilfalnyledygledladytacfartrikreqdentdgkeqkphrkk
prveihferaegdpfyikhnnvilrtqkkgaqtyifrmgvyelkylvlls
llgkgaeavkridryvhslrnqlphiekksteeiegyvrflprfvrshlg
llgvddekkikarvdyvkakwlekkeksrelqlhrkgrdilryinercer
plnideynrilellvtkhldgfyreleelkktrridknivenlsrhksvn
alhekvcdlvvqeleslgreelkeyvglipkeekevsfeektdrvvkqpv
iykgflrneffresrksfarlveeavrekgevydvplggeyyeivsldtf
dkdnkrlyetlamdrlllmiarqyhlslnkelakraqqiewkkedgeevi
iftlknpaqpeqscsvrfslrdytklyvmddaeflarlcdyflpkdeeqi
dyhrlytqgmnrytnlqregieailelekktigpeqprppknyipfseim
dksayneddqkalrrvrnallhhnlnfaradfkrfcgimkregiekrwsl
av
Cas13b-t3
(SEQ ID NO: 274)
maqvskqtskkrelsideyqgarkwcftiafnkalvnrdkndglfvesll
rhekyskhdwydedtralikcstqaanakaealrnyfshyrhspgcltft
aedelrtimerayeraifecrrreteviiefpslfegdrittagvvffvs
ffverrvldrlygaysglkknegqykltrkalsmyclkdsrftkawdkry
llfrdilaqlgripaeayeyyhgeqgdkkrandnegtnpkrhkdkfiefa
lhyleaqhseicfgrrhivreeagagdehkkhrtkgkvvvdfskkdedqs
yyisknnvivridknagprsyrmglnelkylvllslqgkgddaiaklyry
rqhvenildvvkvtdkdnhvflprfvleqhgigrkafkgridgrvkhvrg
vwekkkaatnemtlhekardilqyvnenctrsfnpgeynrllvclvgkdv
enfqaglkrlqlaeridgrvysifaqtstinemhqvvcdqilnrlcrigd
qklydyvglgkkdeidykqkvawfkehisirrgflrkkfwydskkgfakl
veehlesgggqrdvgldkkyyhidaigrfeganpalyetlardrlclmma
qyflgsvrkelgnkivwsndsielpvegsvgneksivfsvsdygklyvld
daeflgriceyfmphekgkiryhtvyekgfrayndlqkkcveavlafeek
vvkakkmsekegahyidfreilaqtmckeaektavnkvrraffhhhlkfv
idefglfsdvmkkygiekewkfpvk

[1276] Loci of Cas13b-t1, Cas13b-t2, and Cas13b-t3 are shown in FIGS. 54A-54C. The sequences of the loci are shown below:

Cas13b-t1 locus
(SEQ ID NO: 275)
agctgtcccgctgagatattaacaagcattaccgctaaattttccgcggactgttggttttcagcttcgtgaatgccaa
caacaaaaggccctgtcgaaagcacaatttcggtggtgtcatagaaatccaggactttgccttcgagggttttattggtt
gccttctttgctgtggcgccattttcaatcagaaagctgcgatagctttctgcgactgcctcggcatctttgggaccgga
gcgtttgctcagaaatgccgtgatggtttcaccgttaagctggtatccggcagcgaagatgtcagtcaatccttcaaagc
caaatgcacttgccagataaagataatgatcctgggaccaaattatcctttggcaggtgctcgatttcaggtatagcg
gtatcatcgtgaacggccaggttcgtgggaattttccttgcgacttccgccattgccgcaaacagctcatccgattcggc
gaagccgaccagctcgatataatattggccgtgcgcaagataaaacgcattactggttttgtatgcaaattgcatatccg
gcaggttctcaacttcgggcctttttgcacgctgtaaaccgagaatgcgtttctggttctggccatatcaaagatatag
agctccatcaccaggttttcatccgcctggcttacaaatctctgggtggacaattttataaaaccagcgtcgatataaag
gggggccttgccgttaatcttttcgtaaagattttcggtggtgtagacttcaatttctgaaagcgttttgaatccgtaag
gcagaagaaaagtcaggtctttcttttgttttggcatctgctttatgaataccccaacggcgataagtaagagaatcgct
aataagcagatgcctataacagattcgagacgttttgcccggcttggtaccgaacccataaccaactccagtaatgacaa
attacttgactttataaccgggctggattataatttttgccggtgttgctgtcaaccccaaatgctacaggtgaaaaagg
cgaagatagatttctaacgaggttgacaaagcaggtcagggcgtgttataataggttgctaaagtaaaaaggagactgaa
atgattgaatatgcacaatatttggggttttggacgccgggcccccttgaaattgctgttattgcgattgtcgctcttct
gatattcggcagacggctgcctgaaatcgcccgcaacgtaggcaagagcctgactgaattcaagaaggggatcacgagg
ccaaggagaccaaggacgaattggtggatgatgtccgggaagtcaaggatgatgtggtaagagaggcgaaggatgccgcc
gggctgaatgaagaggatacaatgggctctgattgattattgataaaggggaactaatcactgagaacaattgtcaatca
ttaatcaacaatcaatattgaagatccgcctgtggcggaatcaatttttaagatgggcgatacaaagaagaaagaggacc
tccttgattccactatgagtctgggcgaccaccttgaggaattgcggatgcggctgattcgcgcgctggtgggcctggcg
ttagctatattatctgtctgatcttcggcaagctgctgatatcatttattcaaaaaccttacgttgctgtgatgggtga
agaggctactctgaagacgcttgccccggcccaagggattaacagctacgtaaaaatagccttggtctcaggcttgatat
tctcatcgccctgggtatctaccagttatggatgttcgtggctgcaggactctatcctaatgaaaaaagatatgtgtat
gtagcagtacctttttcggtggtattatttgttgccggagctttgtttttcatctttgtagtggcagaagtgtctcttgc
tttcttaataaaggtcgacaggtggctcggactggaacccgactggactttcccgaagtatgtgacctttgtaaccaccc
tgatgctggtatttggtgttgcgtttcagaccccgatagctattttctttttgaacaagacaggtctggtttcagtccag
gcgttacggcggtcaagaaaatatgtactgctacttatcgttgtagtagcagctatggcgactccgcctgatgtggtttc
tcaagtaacactggcgataccgttgtatgtgctgtttgaattaggcatactgctgagttactttgcagaactaaaaaaga
gaaagtcgaaaaacaaccagtgataagccgacaatccccagctttcccagtaccgactacttgtttctttcgggcctggt
ttttatttcgtcaatcgagcgactaagaaatcttcaaaggcgcttaaatccttccataccgtggcacagttaatggtttt
ggctttgttatctattacggtgtatccatagtcggtaacccgaatgccgagtttttcgggctcattttagacatttgcat
ctatgccgccggcagcgctgaaggttttttcggagctaattgagtattcagcataaatgttgaacggttttgccaatgcg
ggtactatgatgttgatgctaacgttgataaatacaaatgtgatggtccctcccatagggcctgtcggcctggactatat
cgcaggagccgtcagggcagccgggaaccaggcagacgtagttgatttatgtcttgctgatgacccgtcaaagactctcc
agggctatttcgctacgcacagcccgcaattggtgggggtctcttttcgcaatgtggacgattctttctggccaagcgcc
cggtggttcgtccccgacctggctgacactatccgtacgatacgaagtatgacggatgcaccaattgtagttggcggcgt
tggcttttccattttttccgagcgaatcgtcgaatataccggcgctgactttgggattcggggcgacggagagcaggcaa
tagtttcacttcttaatcagctgcagcggccggaacggcttgaacgcatagatgggttagtccggcggcgcgacggagtt
attcacagcaaccgaccagcgtggcctgcaccgctttctttgcgcaccgaacgtgatgcgattgataacctcgcttactt
caaaaaaggagggcagtgtggtgtggagaccaaacggggctgtaaccgccgatgcctatattgtgccgacccgctggcta
agggtgcggcagtcaggccgagggccccgtcggaggtcgccgatgaggtccagtctctaataggcaagggaatagaagta
ttgcatttgtgcgactctgagttcaacatctctcaaagccacgcctatgcggtctgcgaagagttcagccgtcgctcatt
tgcgaaaaaggtgcgctggtacacatatatggcggtggtgccattcgatgccgagcttgccggggctatgagcagagcgg
gctgtgtcggtatcgactttaccggcgactctgcgtgcccatcaattctaaagacctatcgccagcggcatcataaagaa
gaccttgcctcggcggtgcgtttgtgccgtgctaacggcataacggttatgatagacctgctgtttggcggcccgggtga
aacgccggaaacggtcgcagagacaatagatttcattaagcaaattgacccggattgcgcaggggctccgctcggtataa
gaatctaccccggcaccgaaatggcccgaatagtggcaaacgaaggcccaccggaaacgaacccgaacgttcaccgaaag
tacgaggggcctgtggatttcttcaaaccaacttactatatatctgaagccctcggtgagcagccggccgggcttatcaa
ggatttgatttcggcagatgaaagattctttgagccgatgccggaaatagccccggaggctctaaaaagtagccagtcca
ccgaccacaattacaatgataataccgaacttgtagaagcaatcagcaaaggtgcacgcggggcatattgggatatactg
cgcaagcttcgctgcgactaagcagcttatggtagtagatgattcccgcctgcgggagattggcccgaatcctgaggaat
ttgttagaagcggatgcaatgttgatttttggggtaaaaacgggggcagggggatttggtccccggtttgaggattccga
gaagcccacccgtagggatctccgctcccttagggataaattcgcttcgagtttgaaattggtccccggtttgaggattc
cgagaagctcacccgtagtgatctccgcttcgcttcggctttgtttgggtttgttttcccgcgtctgcgaagtggttca
ttttcataatcctttataacatataagtttacgttcattttgggctttcggcaaattgggtttgaattgggtttgttttt
ttggactgcgaaatcatctttttttctgtaaacctttgttataagagagtttacattcatttgggcatttagtaaattgg
gtttgattggctttgaattgggtttgttttcaccaagtgtccaattggatttattttcataatcctttgtattatatgga
ttacgttcatttgagcatccagaaaattggctttgttttgcataaaaagggctgatttgtagaggactctttacagttg
tagagggcaagttagttaagagtgagctaaagtgcctaaagtgaactaaagttggattctcgattctcgtatagcgtata
gcgtatttcacggttattcaccattcattaaggaataaatttgattaggcctgctggcccctccggcgattagtaaatgg
ttctcggcggcaaaacaacgcgcctctataattgggcgaacatgcacgtttgagtcgaaaattggtgctttcttgacagg
ataaacaggagtaactcgttgtgagaaaaggagtaaaattttttttcaattttccgattttaggttccaactacctgcac
ttttgattgaaaaatcacaaatgtcttgcctattttaacgcagtttttcgtcgaaacgtcagcgaactaggaaaataggc
gatttctgggggaaaacaaataaaaaatgcacaaaagtgacaaaaaaacggccaaaaaagtgctttttttggctgccttt
accccgtgagatgatttaccaaaccttcctctgctattcctatgcaagtttgctcagggctggtgtgaatactataaaaa
tttgtgctgtaatcactccacaaatcggaggcttcttcagcgtggaaattctggaggccaaaatgaaatacgctgtaatc
accccacaaatcggaggcttcttcagcttcactacctctcaaatcgcccaactatacgctgtaatcaccccacaaatcgg
aggcttcttcagctcgcaagtcccgtccacgcacaaagtttgagctgtaatcaccccacaaatcggaggcttcttcagca
tgagcttttggttgtgctggatatgccagctgtaatcaccccacaaatcggaggcttcttcagcacaaaacggttcaaca
aggtcgaagaactagctgtaatcaccccacaaatcggaggcttcttcagcttctgcggagtctttcgccggtgttcaaat
gctgtaatcaccccacaaatcggaggcttcttcagcctatcctttataatacattttcctatatagatttacaatacaaa
acccacgacaaaactgacttcttcttttgaatcatgccgtattataacacttttttacactatcaaagaccacttttttt
ctattccttctcttttcacgaccccatagaatctcttcagatgttccctctcaaaattgagattatagtgcaaaagcgca
tttcgcacccgctttaaagcaacctgttgatcattattataaccgcttctattcattatctcctgaaattctatataatt
ttttgctggtttaatctttcttcgttcgataatccttccttcaagctttagtattgcatcgattccctctttttgaaggt
ttgtatatttgtcgaacgcccttgcatagtgcttatggtagtctatttcttttgcttcttttgggataaaatattcccaa
agtctgcttaaaaattcaggatcgtccattacatacatctttgtataatccaagatcgaaaagcgtatcgaaaaactctt
cttttgctcttttggattttggaatttgaaaataatcacttctctgccatcttccttcttccaatagatatgctgtgcct
tttctgcaagtttttcgttcaatctgagataatattgccttgccatcataaggcaaagtctgtccattgccagtgtttca
tatagcttcttgtttgttctgtcaaatcgatcaagagatgggatgttataatactcttcaccaagaggaatatcaaaatc
cgaccactttgtcttaattgcttcttcaacaagtctggcaaaactctttttgtcttctttgaagaattcgtatctcaaaa
atcccttataaacaaccggctgttccaaaatcctatctaccttttctctaaaagttacctctttttcttctttaggtatc
agcccaatatattccttgagattctccgattgcaaactgcccagttcttgtagaaccaaatcacataccctttcatgaag
tgcattgagcgttgtatgcccggaaagcttctggataatatttttgtctaatcgtctggttcttttcagttcttcaagtt
cattataaaatccggcgaagtctttgttcactataaactttaaaatattattatattccttcctgctaagtggcctatcg
catcgctcgttgatatatctgagtatatcccttccttttcgatgtagttcaagcttcctcgatccctcttttttatccgt
ccacttggccttaacatattccaatcgagtctttaaccttttctcatcatcaacctgtaaaagacctagtcttgaacgta
cgaatcttggaaggaagtttatagatttttgaatctcctcattacttattttatctaaataaggcaactgcttctttaaa
ctactaatatagcggtcaattctttgaattgcctcttcggcttttcccaatagactcaaaagaacaagatatttaagttc
ataaactcccatcctgaatacgttggactgtccaccttttttttgagccttcagaataacattatttcgtttaatataaa
attggtcttgcttctctttgtcaaaatgaatctcgactaccggcttttccctgtgaaatttgtgtttgttaccatctgtc
tcttcgtatcttcgttctccatttaattttacttatgcaaaacatgctgtgtagtctgccaaatccttaagtccata
atcctcaagatatttcagtgcaaataatatgaacttgtccgtattattcgctcaactgatcctggcttctctttcgag
ttagtttgatatgctgatatatctcagtgggaactcgggacaggtatccgagaatatccctgaacataactgcatcatgg
tcctgcgcctgaaccgaataactatccttaagacaatatttggaaaaaacttgccgtgttatattatattcaccctctgt
ttttctaaaccatggacatatcccattaagcgatttaaaaatcttattcaataaaaaatgagacaaagaatactacac
ctgctgatgttatcttatcttcttcttcaaataactctggaaattcaatcgaaatatcttcttgttgttttttcttcgct
tcaaaacggctctttcgtatgctttttccataattatccttatggtgtcatttcgattgaatatcaggcagtcaggcgc
gtgaagataatgtgagaaataattccttaaattattagtattcactggccgctatttgaatttatcttttactttgt
tttcctctctttttcataaatcagttttttgtttcctcattaaaccaatcctgtttcatgattttttcaaatcttgta
agtgtttgctcaaataactttggattttcctctaaatttgtttgtgctctattaagaactattgcaaaacaccacttttt
ttctccttcatattgctcgatagaatacacttctttattgcttgttttttttatattttcaaactccatatttttaatcc
ccgatcttctactaatataaagtcaaagtggtgcgaaatatcgcaccctaccctctgcctgcgcaggaaagaccaacgg
acgattcgatgcagtttgagctgccaggtgatttatcattcaaggggtaaaatagcagaaaagccttaatgtgtcaagg
ggattttagatttactatttccaatttacgattttggattgagattgatcggcctaaaagacaggcctcgcaatgaccc
ccttagagttgaaagcactctaaacaagggggcaggcggggggaatatcgaatatcgaatctgaatgtccaatgtcgaag
tgcaactgcgcgggaatgacaggtcggcagatttatttaattctgtggccagatccctccgcttcgtccacctgcggtgg
acttcggtcgggatgacactgggggtgtgccattgctccgctcg
Cas13b-t2 locus
(SEQ ID NO: 276)
agccgagtcgatggtagctaaggtgaacgacaagcgtggttatacggagataagttgatgcgactggttatccatgagga
cgaagtagattcgatggattggttatatggaattagatcgaaacgtatacctatgaagctcacagtcaaataccaatcgg
gatagaaatgcggcgcgcgcaaccttaggcaaaggcttggctgtttcagcgtttccgctttacgtgcccgtttagccttc
accatagtccacctttccgcaagcctccctgcgatcccggacagtcggatttcccaaatccggttctggtctcggcccta
tttgtcattttctggataaaggccttcctgtacaatttgagacttaagtgctagctcacttgcaccccataattgtacag
tttaccagtatcctcgttccgagagtccatggcattcgttccagttcggtgcctggatgcacatgccttactcagaacca
ccgagtacccagagcccattgtcaggcgtgggcgctacccactacctggatgactttgaaagtcacctcagaagacatt
actatccttcatagctcatacggactcatgcgccagaccaaatccctcccaacgtcttggttttcccttgtacgttagg
tctttgcaggttgtcgccagtccctgctgggaaacggccatcccgacattatctctgcaatccttgtataggtgcaagg
accataccccgcagcgtcccttcggtgcccttgcccgtttcttcccgaaggactgcggtctcacctcaggatttaaagg
ttcgacacgccaattatccgtcgcaatgcaacttcaacaacggggcaaatttcggggctgcagtcattccataacgttca
agctcctatacctgctatgccctgcggttgcacccaccactgagcatatatgagctcagggcagccgggccgtttacacc
acgcatcgcccggatggttacccattccgagatgtggcatcgctacgtgcctgaatcgggcaactggcacgacgggactt
tcacccgctggattgcagccttgtcggctgctccaaatccctgttgccacaaaaattttctttgaggcatccacgttacg
acgtgtcggccacgcttcgtagatatctgaacagcctttcgacttcacgatgcattataatggacatcgtgaatctagc
tatgtcatggtcaatcgtagtgtggccaggggccggccaatcgagtatacttgataaagtgttcatgaagctgtattct
taatctcccaagagtatgcttcgaacgtttaagaaatgacagatagtggtgaagtggtctgaaaacgggcccgggaggcg
aagacgtgagtacaggtacagtgaaatggtttaatgcaagaaggggatacggttttattgtccccgatgatggcggagat
gatttatttgttcaccgttcggacattaacacagaggactatgcatcgcgagattattaaggtcggcaacgacatggttg
ccgaccatatcaatcataagggcttggataatcgcaaggccaatttgcgagcggcgacgattgcgcagaatgcgtggaac
cgccagcgcaaaagaagcggatttatgggcgtagtgtggaataagcagatgaggaaatggcgtgttaatatcagtcacga
gggcacgtgcaggcatatcggctacttcgatgatgaggttgaagcggcgaaggcgcacgaccgggcagcgaaaaaatatc
acggagagttcgcgagtttgaatttcacgcgttaaagccacatcacagcgagtccgactatggcggacgcagcaatctta
agcatatttggctgcgcaatgtgttgcgcgggttcctgcttggggcgagctatcgaggtgtaatcaccccacaaatcggg
ggcttctccagcgccgtaaaagttgataagaattttagatgcgccgtaatcacccctcaaatcgggggcttctccagcgc
tgaccgaattgataaaaccaagagagcgctgtaatcaccccacaaatcgggggcttctccagctgtacgacaaatcataa
cagaatatttgaagctgcaatcaccccacaaatcgggggcttctccagcaaaatgagacaccacgcttgacgtcactgtg
ctgtaatcaccccacaaatcgggggcttctccagcttcgagctatatctggctcggtctgatttggctgtaatcacccca
caaatcgggggcttctccagcactggcttagcaagttcctttgggcgtttcgctgtaatcaccccacaaatcgggggctt
ctccagctaatcgaagatgagaccgaagactatcactgctgtaatcaccccacaaatcgggggcttctccagctgattgg
gaaagcactccttacgcacgagagctgtaatcaccccacaaatcgggggcttctccagcacatcctcgataatacgttat
ctcgattggatttacaacagaaaaatcactgaaaataccagggtttttggtgcaatgcgcacacattagaacctgttttc
atactgctaaagaccagctttttcaatcccttcccttttcataattccacagaacctcttaaaatctgccctggcaaaa
ttaaggttatgatgcaaaagcgcgtttcgcacacgtcggagagctttctggtcatcttcattgtaggcgcttttccat
tatctcgctaaatgggatgtagttctttggaggtcttggctgctctggaccgatagtctttttcaagctcgagtatgg
cttcaattccttccctttgcaggtttgtgtatctgttcatcccttgcgtataaagcctatggtagtcgatttgttcttcg
tcttttggcaaaaaataatcgcaaagtcgggccaaaaactccgcgtcgtccatcacatagagtttcgtataatccctcag
cgagaaccgtaccgaacaactctgctccggctgtgccggattcttcaaggtgaaaataattacttcttcgccatcctctt
tcttccactcgatttgctgtgccctcttggcaagctctttgttaagactaagatgatattgccttgcgatcatcagcaaa
agcctgtccattgccagtgtttcatacagtctcttattgtctttatcaaacgtatcaagtgacacgatttcgtaatactc
cccccccagaggaacatcataaacctctcctttttccctcaccgcttcttcaacaagcctcgcaaaactctttctgcttt
ctctgaagaattcattcctcaaaaatcctttataaataaccggctttcacaaccctgtccgtcttttcttcaaatgac
acctcttttcttctttgggtatcagtccaacatattccttcagttcttctctgcctaggctttcaagttcttgcacgac
caaatcgcacaccttttcgtgcagcgcattgacgcttttgcctggaaagattgcacacgatgttcttatctatccgtc
tggtcttcttcaattcttcaagctctcggtaaaacccgtcgaggtgcttagtgaccaaaagctccaaaatacggttatat
tcatcgatgttcagcggcctctcacaccgctcattgatatacctcagaatatcccgtccttttcgatggagctgaagctc
cctcgactttcttttttccaaccacttggccttaacataatcaactcgcgccttgatcttttttcatcatcaaccc
ctaagagacccagatgggaacgcacaaacctcggaagaaatctcacgtatccttcaatctcttccgtgcttttcttctct
atgtgaggcaactggttgcgcaagctatgaacatacctgtcgattcttttgactgcctctgctccttttcctaataagct
cagtagaacaagatatttaagctcgtagacgcccatcctgaatatataggtttgggcgcctttcttctgagttcgcagaa
tgacgttattgtgtttgatataaaatgggtctccttcggctctctcaaaatgaatctcgactctcggcttcttcctgtga
ggtttctgctccttgccatctgtattttcgtcctgctcccgcttaatcctcgttctggcaaaacatgctgtgtagtctgc
caaatcctccagcccgtaatcctcaagatagttcagcgcaaacaatatgaacttgtccgtattattcgcttaactggg
tttcgcttcgcatttgcgattattgatacgctgatacgactcactgggaactcgtgacaaataccccagaatatcccgg
aacatgaccgcatcatgatccggcgtataaccgaataactgtccctaagacaatatgtcgaaaaaacgtcccgcgttat
tttatattccccctctgtacgcgtaaacccctgaacatatcccattaaccgatttaggaaccttctctcagcaaaaaatg
acgcgaaaaataccacacctgctgatgttatcctgccgttctatcgaacaactccccaaattcaatcgaaatatcttcc
tgttccttttttgcctgttcaaaacgcgccttttcgtacgctttttccataattatcctgaccgggtcattttgggtgaa
tatcaggcagtcaggcgtatgaaaatagtgcgagaaataattcctcaaatctctaagatttcatcagccgctttttgaa
tttcctcctctacttcgttttgttcttgttttgcatagatcagttttttcgtttcctggtcaaaccaatcttcctttctg
atcctttcgaatcgtgtcagcgtttcctcgaacaacttcggattcccctgcaaatttgtttgcgccctattaagcactat
cgcaaaacaccacttatggccccctcatattgctcgatagaatacattccttggctgcttcattcttgatattttcaa
cctgcatatctcagactctcccaattgttgtttttcgccatttttgttgaagtccccgaatgtcagtctattgggccagc
tgagtcaacccacaaggcacaatgtacatacagtctcgagtcatttcgagaagactttccgctcgcccgataagataagc
tttgagtatctcacggggtggacccgagcagataattccacatctcgtatccggtgaagctatccggcataaattcgtgc
ttagtgaatcgtgtttcgtgttgatacggctcccggctgcattcacttttcacggcagagaatatcgcaaaataaggcaa
cagtcaaaggaaaaagggtaaaaatggtgaaatagatgagcgagcagtgaattgttgtggcaagcaagccgcaaatgaat
ccttcggccacgctc
Cas13b-t3 locus
(SEQ ID NO: 277)
tatccaaaatgtggtttgaattcaagaatcaacgctttattccttaaaaaggggcggtgcgatggaaaaagaaccagaaa
catccgtgcaatcggcgtcgggacacaatatggatatcccgattgactggtcggtaacctcacgctatttcgaagatgaa
gatacgctgatgcaggtggtggggatatttgctgaagactctccgcagaccgtccgggaccttgccaaggctatacagac
gcaaatatcccaggatgttcaattgcacgctcacagcctgaagggagcctcggctcttatcggggccgaacatctgcggc
aaagagcctggcggcttgaatacgccgcccaggagaaaaacacggcggcgtttgaggcgctgtttgacgagacaaaggcc
gagttcgacaagctgatgtcgttcctttaccgcgccgattggattgaagcagcaaaagaacgccactgcaacaggcaaca
ggccgagcaggtatgaaacatcttttggaaaagaaggcgatggaatgagtggatggttctccattttgatcattgatgat
gacaggatggttacagacaagttggagaagatcagcggcgccaaggctgcaaagaaaaggttcagcctggcaggcgtttt
ctcaaagggcgcctgaagccatttatttgcaggcgtgctaccgcttgtcaacgggcaggggacagaaccgcaatcaggat
taccatcagtttcttcattccattaacctcgctttttcctctcgttctttttcttcttcctggttttcgcagcgttgggc
tgtctttttgccggttttgtatagttgtcgccgtaaatgtcaatgagtgcggcttttagtttttcgggccagttgcggtt
ttcaaaagcgcacacgagcggatcgccgctttgtttcatccagttatgaagccggccctgcatcttcttgatttcgctcc
tttgctctgcggaatcgataaggttgttgaggcagtcggggtcatttctgagatcatagaactcctcggccgcgcgatat
ctgaacatcttgacgcgctgtgcggcgaacttattcgttggagcggcctcgaccatcgccttcatggtaaggccctcgtt
gttgtttcggtaccagaatctgccgtcggcccacggattgaagatatagccgaagcgcttatcctggacgcaccgcatcg
ggacagcgtctccgccggctttcatgtctatctgcgtaaagaccacgtcgcgtccggattgcttttcgcctttcaacagc
cccaggaaagaggaaccgtcaagccccctgggtatgcccagaccgaccgcttcgagcaccgtcgggaagaagtcgatccc
tgagataaagtgcgccttatcgacggcgcctgcttttaccatttgcggccaacgaacgatccacggcgtccgcgtgctgg
caagataggcgttgcattttgcaaacggtatggcgatgccgttgtcggagaggaacatcacaagcgtattctcctcgaag
cccgactccttcagggcctgcaacgtcttgccgaaggtatcgtcgagtcggcggacggagttgagatagcagctcagttc
ctgccgaacgcccggcaggtcgcagacaaaaccgggaaccgcaacctcatcgggcttatacgtctttgaaggttcctttg
cccccttgattggcttgccgccgatatgatacgggcgatgcggatcgtgcgagttgaccataaagtagaagggcttattc
tcgcggcgacacctcgccagaaactccttgcagtaaactgtaatagagttccggatcgcggccggcgccgagttccttct
ggtcatgcacaaaatcccatttgtaatccgcatggggcgttgagtgccccaccttgccgagaataccggtaagatagccg
gcatccctcagcgtctgcatgacagtcatcaccaaggcggcgcccaatcctgcggcccttagaaaatcacgacgattcat
cattgtccccactaatccttattgttcttctcaagataccccgacaatttctgcatttgccgatacaggccgccgggaca
tatcagtatagccgcaaaccttgaaaatatcaacctcccggaatataacgtcgacttccaacccagatcgccaatccaga
ataagaaaacaaagcaaaacgcttcaaattcgtttaaccccagggttcgcctgaggttcgtaaacaccatctcgatgtac
atcgggattcaaattcgttgagccccagcccttcttgtggctcttgttcggcaagaaacgctgtaatcaccccacaaatc
gggggctgctccagcatcgccaagacgggcaatgccgctttgaggctgtaatcaccccacaaatcgggggctgctccagc
tgatttcgagtttcgatgctttcggacagggctgtaatcaccccacaaatcgggggctgctccagcactccttatggaga
aggagcttatcgtgtcgctgtaatcaccccacaaatcgggggctgctccagcttattccttccatcatcccgacagcagt
gggctgtaatcaccccacaaatcgggggctgctccagcccactttcgtaaccattttactcgcaaacgcttataacgaaa
acactttccaaaaaccataccaacgtcctcatttaacaggaaacttccactccttttcaattccatatttcttcataaca
tcactaaacaacccaaattcatctatcacaaactttaaatgatgatggaaaaacgctctacgcaccttattcacggcggt
cttctccgcctctttacacattgtttgtgccagtatctcacgaaaatcaatataatgcgccccttccttctcgctcatct
ttttggctttgacaaccttctcttcaaacgccagcaccgcctcgacacatttcttctgcagatcattatatgccctaaac
cctttttcgtaaactgtatgataccgtatcttccctttttcgtgcggcataaagtactcacatatccgcccaagaaactc
agcgtcatccaacacatataacttgccgtaatcactcactgagaagacgatgcttttttcgttacccactgagccctcca
cgggcaactcgatgctatcattcgaccacacaattttattacccaattccttgcgtacactccccaggaagtattgcgcc
atcatcagacacaaacggtctcgcgccagcgtttcatacaaggctggattagcaccctcgaatcgcccaatcgcatcaat
atgataatactttttatccagcccaacgtccctctgtccgccgccgctttccaaatgctcttccacaagcttcgcgaatc
ccttcttgctgtcataccagaacttcttgcgcaagaaacccctgcggatagaaatatgctccttgaaccatgcaaccttc
tgcttgtaatctatttcatccttcttcccaagccccacataatcgtagagcttctgatcgccgattcggcaaagtctgtt
gagaatctgatcacacaccacctgatgcatctcgtttattgtggaggtctgcgcaaaaattgaatatacccgcccgtcga
ttcgctcggccagttgcaggcgtttcagtcccgcctgaaaattctcaacatccttgccaaccagacacaccagcagccgg
ttgtactcgccgggattgaaagacctcgtgcaattttcatttacgtattgaagaatgtcccgcgccttctcgtgaagtgt
catctcgttggtcgccgccttcttcttttcccacacccctcgaacatgctttactctgccgtctattctttgcttaaaag
ctttcctgccaatcccatgttgctccagcacaaatcgcggcaggaagacgtgattatccttatctgtgaccttcactaca
tccagaatgttctccacatgctgccgatacctgtacagttttgcaatcgcatcgtcgccctttccctgaaggctaagcaa
tacaaggtatttcaattcgttaagccccatgcgataactccgaggcccggcattcttatcaatcctgacgataacattgt
tcttactgatatagtatgactgatcttcgtctttttttgaaaagtcgacaactaccttgcctttggtcctgtgctttttg
tgttcgtcgcctgccccggcctcctccctgacaatgtgtcgccgcccgaagcatatctcactgtgttgcgcctccagata
atgcagtgcaaactcgatgaacttgtctttatggcgtttcggattcgtcccctcattgtcgtttgctcttttcttgtcgc
cctgctctccgtggtagtattcatacgcctccgcagggatgcgtccaagctgcgcgagtatatccctgaaaagcagcacg
cgtttgtcccacgccttcgtgaaacgactgtctttcaggcaatacatcgaaagcgccttccgagtcagcttgtactgtcc
ttcgtttttcttaagcccacttaccgcaccgtacaaacgatccagcacccgccgttcaacaaagaacgaaacgaaaaaca
caacccccgccgtagtgatccggtcgccttcgaacaggctgggaaactcgatgatcacttcagtttcgcgtctcctgcat
tcaaagatcgcccgctcatacgccctttccatgattgtccgcaactcatcttctgctgtaaatgtcagacacccgggcga
atgtcgatagtgggagaaatagtttcttaacgcctcggccttcgcattggccgcttgtgtgctacacttgatcaaagcgc
gtgtatcctcatcgtaccagtcgtgctttgaatacttttcatggcgtaacagcgactcgacaaaaagcccgtcgttctta
tctcgattcacaagagccttgttgaaggcaatcgtaaaacaccatttccgagcaccttgatattcatcgatagacaactc
tctctttttcgaagtctgctttgacacttgcgccattgagcacctcccattccagattttagtgcgatctttacctcatg
cctccacaacactcccagcgccaaacgttgagcaaagcaaaatacgccgcaggcgggctccgtcgaatccgtaatcctaa
tttctaacttcccaatcatctaaaccgcccgcaaccgatttgtcaaccaaaaaccacatcaatccgcagatggccgcaga
taaccgcagatattgcaactaatccacccaacccaaaacctctgttccatctgcgccctctgcgaaatctgcggacagct
ttttttttcgtgcccttcatgtcttcgtggtgaatttcatttaacatttgacaaatatcaaacggcatggtataatgcgt
tgcgtatttaaggacaaagcaacaccaaaaacagggggagtaaaaaaccgtgtccatccaaaaagaatcgcaggccgcag
gcctgccacctatgattaacctcggtctttcagccaaggatgctccccacacccaaacaagcgaaacgaaccgtgcgcca
agctaagctggtgcaattcagcaggtgtaatcctgcccggtcaaaggttagccgcccggccggaatgaacatgtacgtat
aaggaggcaacaaat

[1277] More detailed sequences and features on Cas13b-t loci are shown in FIGS. 55A-55C.

[1278] Alignments of Cas13b-t1, Cas13b-t2, and Cas13b-t3 with other Cas13b orthologs is shown in FIG. 56. In FIG. 56, Sequence #6 is Cas13b-t1, Sequence #1 is Cas13b-t2, and Sequence #2 is Cas13b-t3. Other sequences are Cas13b orthologs.

[1279] Cas 13b-t is similar to Cas13b from Alistipes sp. ZOR0009 (Cas13b4, NCBI accession WP_047447904). Human codon optimized proteins (codon optimization by GeneArt algorithm) synthesized by GenScript into pcDNA3.1(+) backbone for mammalian expression were used. Knockdown of Gaussia luciferase was tested in HEK293FT by two guide RNAs with non-targeting control. RanCas13b (B6) was used as a positive control. Luciferase values were normalized to non-targeting control—if no knockdown, value ˜1. Some noise was noted in this measurement, so some values were slightly higher than 1 but in an acceptable margin to be attributable to noise. Gluc knockdown in mammalian cells by Cas13b-t1, Cas13b-t2, and Cas13b-t3 are shown in FIGS. 51-53, respectively. Guide RNA keys for Cas13b-t1, Cas13b-t2, and Cas13b-t3 are listed in Tables 15, 16, and 17, respectively.

TABLE 15
Guide RNA keys - Cas13b-t1

| | | DR is |
|---|---|---|
| | | 5′ or 3′ |
| Key | | to spacer |
| # | Direct Repeat Sequence | sequence? |
| 1 | GCTGTAATCACCCCACAAATCGGAGGCTTCTTCAGC | 3′ |
| | (SEQ ID NO: 278) | |
| 2 | GCTGTAATCACTCCACAAATCGGAGGCTTCTTCAGC | 3′ |
| | (SEQ ID NO: 279) | |
| 3 | GCTGAAGAAGCCTCCGATTTGTGGGGTGATTACAGC | 3′ |
| | (SEQ ID NO: 280) | |
| 4 | GCTGAAGAAGCCTCCGATTTGTGGAGTGATTACAGC | 3′ |
| | (SEQ ID NO: 281) | |
| 5 | GCTGTAATCACCCCACAAATCGGAGGCTTCTTCAGC | 5′ |
| | (SEQ ID NO: 282) | |
| 6 | GCTGTAATCACTCCACAAATCGGAGGCTTCTTCAGC | 5′ |
| | (SEQ ID NO: 283) | |
| 7 | GCTGAAGAAGCCTCCGATTTGTGGGGTGATTACAGC | 5′ |
| | (SEQ ID NO: 284) | |
| 8 | GCTGAAGAAGCCTCCGATTTGTGGAGTGATTACAGC | 5′ |
| | (SEQ ID NO: 285) | |

TABLE 16
Guide RNA key - Cas13b-t2

| | | DR is |
|---|---|---|
| | | 5′ or 3′ |
| Key | | to spacer |
| # | Direct Repeat Sequence | sequence? |
| 1 | GCTGTAATCACCCCACAAATCGGGGGCTTCTCCAGC | 3′ |
| | (SEQ ID NO: 286) | |
| 2 | GCTGCAATCACCCCACAAATCGGGGGCTTCTCCAGC | 3′ |
| | (SEQ ID NO: 287) | |
| 3 | GCCGTAATCACCCCTCAAATCGGGGGCTTCTCCAGC | 3′ |
| | (SEQ ID NO: 288) | |
| 4 | GGTGTAATCACCCCACAAATCGGGGGCTTCTCCAGC | 3′ |
| | (SEQ ID NO: 289) | |
| 5 | GCTGGAGAAGCCCCCGATTTGTGGGGTGATTACAGC | 3′ |
| | (SEQ ID NO: 290) | |
| 6 | GCTGGAGAAGCCCCCGATTTGTGGGGTGATTGCAGC | 3′ |
| | (SEQ ID NO: 291) | |
| 7 | GCTGGAGAAGCCCCCGATTTGAGGGGTGATTACGGC | 3′ |
| | (SEQ ID NO: 292) | |
| 8 | GCTGGAGAAGCCCCCGATTTGTGGGGTGATTACACC | 3′ |
| | (SEQ ID NO: 293) | |
| 9 | GCTGTAATCACCCCACAAATCGGGGGCTTCTCCAGC | 5′ |
| | (SEQ ID NO: 294) | |
| 10 | GCTGCAATCACCCCACAAATCGGGGGCTTCTCCAGC | 5′ |
| | (SEQ ID NO: 295) | |
| 11 | GCCGTAATCACCCCTCAAATCGGGGGCTTCTCCAGC | 5′ |
| | (SEQ ID NO: 296) | |
| 12 | GGTGTAATCACCCCACAAATCGGGGGCTTCTCCAGC | 5′ |
| | (SEQ ID NO: 297) | |
| 13 | GCTGGAGAAGCCCCCGATTTGTGGGGTGATTACAGC | 5′ |
| | (SEQ ID NO: 298) | |
| 14 | GCTGGAGAAGCCCCCGATTTGTGGGGTGATTGCAGC | 5′ |
| | (SEQ ID NO: 299) | |
| 15 | GCTGGAGAAGCCCCCGATTTGAGGGGTGATTACGGC | 5′ |
| | (SEQ ID NO: 300) | |
| 16 | GCTGGAGAAGCCCCCGATTTGTGGGGTGATTACACC | 5′ |
| | (SEQ ID NO: 301) | |

TABLE 17
Guide RNA key - Cas13b-t3

| | | DR is |
|---|---|---|
| | | 5′ or 3′ |
| Key | | to spacer |
| # | Direct Repeat Sequence | sequence? |
| 1 | GCTGTAATCACCCCACAAATCGGGGGCTGCTCCAGC | 3′ |
| | (SEQ ID NO: 302) | |
| 2 | GCTGGAGCAGCCCCCGATTTGTGGGGTGATTACAGC | 3′ |
| | (SEQ ID NO: 303) | |
| 3 | GCTGTAATCACCCCACAAATCGGGGGCTGCTCCAGC | 5′ |
| | (SEQ ID NO: 304) | |
| 4 | GCTGGAGCAGCCCCCGATTTGTGGGGTGATTACAGC | 5′ |
| | (SEQ ID NO: 305) | |

### Example 11

[1280] This example summarizes the results of RESCUE rounds 1-12 (see FIGS. 57-68). Additional phenotypes tested included PCSK9, Stat3, IRS1, and TFEB. PCSK9 showed cloning improved the promoter. Stat3 showed ˜10% editing on sites. Inhibition of signaling will be tested with a luciferase reporter. For IRS1, targeting of synthetic site will be tested before moving to pre-adipocyte cells. For TFEB, targeting may be designed to cause translocation of transcription factor->autophagy. In addition, a panel of 12 endogenous phosphosite targets and 48 synthetic targets will be tested. Screening in yeast will continue on V11 background with S22P. Top hits were screened on V12 for V13 and new rounds of yeast hits will be evaluated. A few hundred additional screen hits on luciferase will be evaluated and Ade2 editing will be validated for specificity screening. Gene shuffling will also be tested for library complexity and different yeast reporters.

### Example 12

[1281] This example lists further information and data related to Cas13b-t.

[1282] Knockdown of Gaussia luciferase in HEK293FT cells by two guide RNAs were tested. RanCas13b(B6) was used as a positive control. Luciferase values were normalized to non-targeting control. Some values were higher than 1 but in an acceptable margin to be attributable to noise. The value was about 1 if there was no knock down. The dead versions have both arginine and histidine residues in both identified HEPN domains mutated to alanine.

[1283] The spacer sequences used in the experiment are shown in Table 18 below.

TABLE 18

| Name | Spacer sequence |
|---|---|
| Guide 1 | GGGCATTGGCTTCCATCTCTTTGAGCACCT |
| | (SEQ ID NO: 306) |
| Guide 1 | GGAATGTCGACGATCGCCTCGCCTATGCCG |
| | (SEQ ID NO: 307) |
| Nontargeting | GTAATGCCTGGCTTGTCGACGCATAGTCTG |
| | (SEQ ID NO: 308) |

[1284] Comparison of dead and live tiny orthologs for Gluc knock down is shown in FIG. 69.

[1285] Recovery of functional cypridina luciferase (W85X) by RNA editing was tested.

[1286] Mismatch distance indicated distance from 5′ end of direct repeat to the A:C mismatch that specifics the desired editing site. Spacer sequences were all 30 bp unless otherwise indicated. B6 spacer was 30 bp and mismatch distance was 22. REPAIRv1, v2 spacer was 50 bp and mismatch distance was 34 (as published). The tiny ortholog constructs HIVNES-GS-dRanCas13bt-(GGS)₂-huADAR2dd(E488Q).

[1287] Positive control constructs are as follows:

[1288] B6 construct: HIVNES-GS-dRanCas13b(B6)-(GGS)2-huADAR2dd(E488Q)

[1289] REPAIRv1 construct: dPspCas13b(B12)-GS-HIVNES-GS-huADAR2dd(E488Q)

[1290] REPAIRv2 construct: dPspCas13b(B12)-GS-HIVNES-GS-huADAR2dd(E488Q/T375G)

[1291] The data on Cas13b-t1 is shown in FIG. 70 and the data on Cas13b-t3 is shown in FIG. 71, respectively. The guides, non-targeting comparison is shown in FIG. 72. Whole transcriptome sequencing for detailed specificity and activity analysis can be performed.

### Example 13

[1292] Programmable RNA editing offers an alternative to genome editing with benefits in safety and flexibility in targeting. An approach for RNA editing leveraging the Type VI programmable RNA-guided RNase CRISPR-Cas13, allows for specific adenosine to inosine conversion by guiding the adenosine deaminase activity of a fused ADAR2 to target transcripts. Here, Applicants expanded RNA editing capabilities to an additional base conversion by directly evolving ADAR2 to have cytidine deaminase activity, with a greater than 1,000 fold improvement in catalytic activity. The system, referred to as RNA Editing for Specific C to U Exchange (RESCUE), lacked strict sequence constraints, edited endogenous transcripts with high efficiency, and performed multiplexed C to U and A to I editing. Applicants performed additional rational mutagenesis to generate a highly specific variant of RESCUE, with greater than 10 fold reduction in A to I off-targets, which retained efficient C to U on-target activity. Applicants showed herein RESCUE's ability to alter phosphorylation signaling pathways in cells and modulate STAT activation and cellular growth. RESCUE expanded the RNA editing toolbox by enabling correction of additional mutations and modulation of more protein residues for broad applicability to biomedical research and therapeutics.

[1293] The programmable modification of nucleic acids in cells has numerous applications in basic research and therapeutics, especially in the treatment of genetic disease. DNA editing, typically through generation of double stranded breaks (DSB) to stimulate endogenous DNA repair pathways such as non-homologous end joining (NHEJ) or homology-directed repair (HDR), has become widely accessible with the development of tools based on CRISPR nucleases, including Cas9 and Cpf1/Cas12a. However, introduction of specific edits, including single base changes, relies on HDR and is inefficient in many cell types. Furthermore, the potential for off-target cleavage or DNA damage responses poses potential safety risks. DNA editors that circumvent DSB formations, such as base editors, provide a viable alternative, although they may be limited by sequencing constraints, such as the requirement for a protospacer adjacent motif (PAM) near the desired editing site and have significant off-targets. However, temporally controlled editing of nucleic acids through RNA base editing would avoid many of these issues and have many applications including modulation of cellular signaling, protein stability, or other post-translationally modified residues.

[1294] RNA base editing offers an alternative to DNA base editors, leveraging the adenosine deaminase acting on RNA (ADAR) family of enzymes to enact specific hydrolytic deamination of adenosine to inosine, a nucleobase that is functionally equivalent to guanosine in translation and splicing. Multiple RNA editing technologies have been developed that direct activity of ADAR or hyperactive variants to target transcripts, including RNA editing for programmable A to I (G) replacement (REPAIR), which uses the RNA-guided RNA targeting CRISPR enzyme Cas13. While these technologies can effectively convert A to I (G), other base changes remain inaccessible, preventing editing of diverse disease-associated mutations and functional residues involved in post-translational modifications. Cytidine to uridine editing via hydrolytic deamination activity would open up the targeting space and provide multiple new types of residue changes. However, many cytidine deaminases, such as the apolipoprotein B rnRNA editing enzyme, catalytic polypeptide-like (APOBEC) family of enzymes, can only operate on single stranded substrates and will deaminate many of the cytosines in proximity of the APOBEC binding site.

[1295] Here, Applicants take advantage of features of adenosine deaminase, ADAR2. REPAIR, using ADAR2, allows for precise editing via formation of a double stranded RNA substrate using the guide RNA, which directs a hyperactive mutant of the human ADAR2 catalytic deaminase domain (ADAR2dd[E488Q]) activity to a single adenosine selected by an introduced mismatch. Applicants performed evolution of ADAR2dd for cytidine deamination to confer this level of precision to cytidine base conversion. Applicants used a combined rational mutagenesis and directed evolution scheme to iteratively boost the cytidine deamination activity of ADAR2dd more than 1,000-fold. This mutant ADAR2dd fused to Cas13b ortholog from Riemerella anatipestifer (RanCas13b) allowed for RNA Editing for Specific C to U Exchange (RESCUE) on both reporter and endogenous transcripts in mammalian cells. Lastly, Applicants improved the specificity of RESCUE more than 10-fold via rational mutagenesis and demonstrated phenotypic modulation of protein signaling and cell growth through C to U editing with RESCUE.

[1296] In order to generate a Cas13b guided-nucleoside deaminase capable of generating programmable C to U modifications, Applicants began a series of engineering steps on a RanCas13b-ADAR2dd fusion (FIGS. 73A-73G). The initial mutations were selected by saturation mutagenesis at residues involved in the binding of the targeted base. Mutants were evaluated for C to U editing and restoration of Gaussia luciferase (Glue) mutant (C82R) catalytic activity (FIG. 77A). Three rounds of rational engineering produced a construct (RESCUEv3) with ˜15% editing on the TCG motif (FIG. 73B). As the surrounding motif strongly determines RNA editing efficiency for A to I editing, Applicants tested for restoration of activity of luciferase mutants with all four possible 5′ bases at the Gluc C82R site and two 3′ motifs at the Gluc L77P mutation (FIG. 77B), finding modest increases in activity with these other motifs. To hasten further improvements, Applicants began directed evolution across the ADAR2dd protein to identify additional candidate mutations for increasing the activity of RESCUE.

[1297] To select for C to U activity, Applicants engineered a set of yeast reporter assays based on either restoration of GFP fluorescence or prototrophic reversion of a HIS auxotrophic selection gene (FIG. 73A, see table 19 for all screens and resulting mutations). With similar approaches, directed evolution of cytidine deaminase acting on RNA (CDAR) may also be performed.

TABLE 19

| RESCUE | | |
|---|---|---|
| version | | |
| number | Mutations | Screening method |
| RESCUEv0 | ADAR2 + E488Q | Hyper active variant from Kuttan |
| | | and Bass |
| RESCUEv1 | v0 + V351G | Rational mutagenesis |
| RESCUEv2 | v1 + S486A | Rational mutagenesis |
| RESCUEv3 | v2 + T375S | Rational mutagenesis |
| RESCUEv4 | v3 + S370C | Y66H EGFP |
| RESCUEv5 | v4 + P462A | P196L HIS |
| RESCUEv6 | v5 + N597I | P196L HIS |
| RESCUEv7 | v6 + L332I | P196L HIS |
| RESCUEv8 | v7 + I398V | P196L HIS |
| RESCUEv9 | v8 + K350I | P196L HIS |
| RESCUEv10 | v9 + M383L | P196L HIS |
| RESCUEv11 | v10 + D619G | S22P HIS |
| RESCUEv12 | v11 + S582T | S22P HIS |
| RESCUEv13 | v12 + V440I | S22P HIS |
| RESCUEv14 | v13 + S495N | P196L HIS |
| RESCUEv15 | v14 + K418E | P196L HIS |
| RESCUEv16 | v15 + S661T | S22P HIS |

[1298] Sequencing FACS-sorted cultures or surviving colonies, for GFP and His restoration respectively, elected individual mutations in the ADAR2dd domain, which were introduced onto the previous RESCUE version and evaluated for activity in mammalian cells on luciferase or CTNNB1 editing reporter constructs. These rounds of evolution, culminating with the final construct RESCUEv16, resulted in a steady increase in activity across all six motifs tested and reduced the RESCUE and guide plasmid doses required to edit and restored luciferase activity. (FIGS. 73C, 73D, 78, 79A-79B, 80). Additionally, RESCUEv16 achieved higher than 20 percent editing on 12 out of 16 possible motif combinations of the direct 5′ and 3′bases with optimal base flips of either C or U (FIGS. 73E and 81). Applicants compared our RESCUE versions with fusions of PspCas13b and RanCas13b, and found them to be equivalently active (FIG. 82). While REPAIR uses 50 nt guides, RESCUEv16 edited the TCG construct optimally with a 30 nt guide RNA with the targeting base-flip 26 base pairs from the 5′ end of the target (FIG. 83).

[1299] To validate the improvements from the directed evolution pipeline in the yeast system, Applicants tested multiple RESCUE iterations for both activity in yeast and biochemically. Testing both EGFP and His restoration in yeast, Applicants found that later versions of RESCUE more effectively performed C to U editing on both targets (FIGS. 84A-84D). Biochemical characterization of RESCUE constructs introduced into purified hADAR2dd protein revealed that RESCUE mutations improved the kinetics of C to U editing on substrates in vitro (FIGS. 85A-85B).

[1300] Further, Applicants assayed C to U activity in the absence of a Cas13b construct. Applicants introduced the RESCUEv16 mutations into both the ADAR2 deaminase domain or the full length ADAR2 protein. Applicants found that editing and restoration of luciferase activity was significantly higher on all 5′ motifs for the complete RESCUEv16 construct when compared to ADARdd, full length ADAR, or the absence of protein (FIGS. 73F and 86A), and that, while certain guide positions achieved editing of almost 20% with full length ADAR (FIGS. 86B-86D), maximal efficiency was markedly reduced compared to RESCUE, establishing that the RanCas13b fusion was necessary for its function. The position of the 16 mutations in RESCUEv16 place them throughout the structure of ADAR2dd (FIG. 73G), indicating both direct interactions of the introduced residues with the catalytic pocket, as well as long-range allosteric effects.

[1301] As RESCUE was evolved to have activity on reporter constructs, Applicants evaluated how well RESCUE could work on endogenous transcripts in HEK293FT cells. Applicants tested a panel of guide RNAs with varying mismatch positions targeting 24 different sites across 9 genes (FIGS. 74A and 87A-87C), specifically choosing sites across these genes to have varying 5′ base identities to interrogate the deamination activity on different motifs. Applicants found that RESCUEv16 achieved editing rates between ˜5%-35% at all sites tested, and that the ideal mismatch position or base-flip was site dependent. Moreover, RESCUEv16 outperformed all other versions on multiple endogenous sites and required less dosing than earlier versions (FIGS. 74B and 88). To better evaluate the relevance of RESCUEv16 for therapeutics, Applicants designed a series of twenty-two 200 bp targets to model editing of disease-relevant mutations from ClinVar (see Table 20).

TABLE 20
Disease information for disease-relevant mutations

| Candidate | Gene | Diseases |
|---|---|---|
| NM_000071.2(CBS): | CBS | Thoracic aortic aneurysm |
| c.325T > C (p.Cys109Arg) | | and aortic dissection |
| NM_000141.4(FGFR2): | FGFR2 | Pfeiffer syndrome/Crouzon |
| c.799T > C (p.Ser267Pro) | | syndrome/Neoplasm of |
| | | stomach |
| NM_000551.3(VHL): | VHL | Von Hippel-Lindau syndrome |
| c.473T > C (p.Leu158Pro) | | |
| NM_002474.2(MYH11): | MYH11 | Aortic aneurysm, familial |
| c.3791T > C | | thoracic 4/Thoracic aortic |
| (p.Leu1264Pro) | | aneurysm and aortic |
| | | dissection |
| NM_000018.3(ACADVL): | ACADVL | Very long chain acyl-CoA |
| c.848T > C (p.Val283Ala) | | dehydrogenase deficiency |
| NM_002397.4(MEF2C): | MEF2C | Mental retardation, |
| c.2T > C (p.Met1Thr) | | stereotypic movements, |
| | | epilepsy, and/or cerebral |
| | | malformations |
| NM_002834.4(PTPN11): | PTPN11 | Noonan syndrome |
| c.853T > C (p.Phe285Leu) | | |
| NM_005609.3(PYGM): | PYGM | Glycogen storage disease, |
| c.2392T > C (p.Trp798Arg) | | type V |
| NM_001256850.1(TTN): | TTN | Limb-girdle muscular |
| c.90211T > C | | dystrophy, type 2J/Distal |
| (p.Cys30071Arg) | | myopathy Markesbery-Griggs |
| | | type/Hereditary myopathy with |
| | | early respiratory failure/ |
| | | Myopathy, early-onset, with |
| | | fatal cardiomyopathy/Familial |
| | | hypertrophic cardiomyopathy 9 |
| NM_005633.3(SOS1): | SOS1 | Noonan syndrome 4/Noonan |
| c.806T > C (p.Met269Thr) | | syndrome |
| NM_015559.2(SETBP1): | SETBP1 | Schinzel-Giedion syndrome |
| c.2612T > C (p.Ile871Thr) | | |
| NM_004572.3(PKP2): | PKP2 | Arrhythmogenic right |
| c.2386T > C | | ventricular cardiomyopathy, |
| (p.Cys796Arg) | | type 9 |
| NM_000138.4(FBN1): | FBN1 | Marfan syndrome |
| c.4222T > C | | |
| (p.Cys1408Arg) | | |
| NM_000375.2(UROS): | UROS | Congenital erythropoietic |
| c.217T > C (p.Cys73Arg) | | porphyria |
| NM_014139.2(SCN11A): | SCN11A | not provided/Neuropathy, |
| c.1187T > C (p.Leu396Pro) | | hereditary sensory and |
| | | autonomic, type VII |
| NM_000152.4(GAA): | GAA | Glycogen storage disease, |
| c.1655T > C (p.Leu552Pro) | | type II |
| NM_020630.4(RET): | RET | Multiple endocrine neoplasia, |
| c.1858T > C | | type 2a/Multiple endocrine |
| (p.Cys620Arg) | | neoplasia, type 2/MEN2A |
| | | and FMTC |
| NM_000016.5(ACADM): | ACADM | Medium-chain acyl-coenzyme A |
| c.199T > C (p.Tyr67His) | | dehydrogenase deficiency |
| NM_014874.3(MFN2): | MFN2 | Charcot-Marie-Tooth disease, |
| c.227T > C (p.Leu76Pro) | | type 2A2A |
| NM_000341.3(SLC3A1): | SLC3A1 | Cystinuria |
| c.1400T > C | | |
| (p.Met467Thr) | | |
| NM_000431.3(MVK): | MVK | Mevalonic aciduria/Hyper- |
| c.803T > C (p.Ile268Thr) | | immunoglobulin D with periodic |
| | | fever |
| NM_004004.5(GJB2): | GJB2 | Deafness, autosomal recessive |
| c.229T > C (p.Trp77Arg) | | 1A/Deafness, autosomal |
| | | dominant 3a/Nonsyndromic |
| | | hearing loss and deafness |
| NM_000041.4(APOE): | APOE | Alzheimer disease 2 |
| c.388T > C (p.Cys130Arg) | | |
| NM_000041.4(APOE): | APOE | Alzheimer disease 2 |
| c.595T > C (p.Cys176Arg) | | |

[1302] RESCUEv16 was able to edit these sites with efficiencies ranging from ˜1%-42% (FIGS. 74C and 89). Applicants further tested therapeutic applications on the ApoE4 allele, which increased ˜10 fold Alzheimer's ris 10 fold and involved two cytosine single-nucleotide polymorphisms that would need to be converted to thymines to generate the protective ApoE2 allele. Applicants tested RESCUEv16 on an expressed synthetic fragment from the ApoE4 allele and found that the system achieved editing of ˜5% and 12% on the two sites (FIG. 90).

[1303] As RESCUEv16 retained adenosine deaminase activity, the native pre-crRNA processing activity of Cas13b enables multiplexed adenine and cytosine deamination. By delivering RESCUEv16 along with a pre-crRNA targeting an adenine and a cytosine in the same CTNNB1 transcript (FIG. 74D), Applicants found that RESCUEv16 was able to edit both targeted residues in the same population, converting the adenine to inosine and cytosine to uridine at rates of ˜15% and 5%, respectively (FIG. 74E). Additionally, Applicants found when editing Gluc and endogenous genes, A to I off-targets near the targeted cytosine occurred within the guide duplex (FIGS. 91A-91C). To eliminate these off-targets, Applicants introduced disfavorable guanine mismatches in the guide across from off-target adenosines (FIG. 74F). This approach significantly reduced off-target editing on both Gluc and KRAS while minimally disrupting the on-target editing (FIG. 74G).

[1304] The A to I off-targets observed within the guide duplex window suggested that RESCUEv16 might have significant off-target adenosine deaminase activity across the transcriptome. Profiling off targets with whole-transcriptome RNA-sequencing, Applicants found that while RESCUEv16 had ˜80% C to U editing on the Gluc transcript (FIG. 75A), it consequently had 188 C to U off-targets and 1,695 A to I off-targets, comparable to A to I off-targeting with REPAIRv1, which had 24 C to U off-targets and 2,214 A to I off-targets (FIGS. 75A, 75B). To improve the specificity of RESCUEv16, Applicants performed rational mutagenesis at residues interacting with the RNA target (FIG. 75C), resulting in multiple RESCUEv16 mutants with reduced A to I off-target activity, as measured by a luciferase reporter, and high C to U on-target deamination activity (FIG. 75D). The top specificity mutant, S375A on RESCUEv16 (RESCUEv16S), maintained ˜76% on-target C to U editing (FIG. 75E), but only had 103 C to U off-targets and 139 A to I off-targets, an approximate 10-fold reduction in the number of adenine deamination off-targets (FIG. 75E, 75F). Although the off-target editing of RESCUEv16S was reduced, it still maintained significant on-target A to I editing activity (FIGS. 92A-92D). Applicants re-evaluated the efficacy of RESCUEv16S on the previous set of endogenous sites and found that it retained similar activity to RESCUEv16 at many sites and at a number of sites, performed better than RESCUEv16 (FIGS. 93A-93C and 94A). Moreover, within the guide duplex window, RESCUEv16S was much more specific, having significantly reduced editing at many local off-target sites (FIGS. 93C, 94B-94E).

[1305] The cytidine and adenosine deamination activity of RESCUEv16 allowed for modulation of post-translational modifications via missense mutations, such as the phosphorylation substrates serine and tyrosine. STAT3 and STAT1 are transcription factors that play important roles in signal transduction via the JAK/STAT pathway and are typically activated by cytokines and growth factors. To demonstrate signaling modulation via RNA editing, Applicants altered activation of the STAT pathway by editing phosphorylation sites Y705 and 5727 on STAT3 and Y701 and S727 on STAT1 with RESCUEv16 (FIG. 76A). In HEK293FT cells, Applicants observed 8% and 9% editing of the Y705 and S727 STAT3 sites, respectively, and 11% and 7% editing of the Y701 and S727 STAT1 sites, respectively (FIG. 76B). These edits resulted in 16%-27% repression of STAT3 and STAT1 activity using a luciferase reporter for STAT activation (FIG. 76C).

[1306] As with the JAK/STAT pathway, the Wnt pathway can be modulated by phosphorylation of constituent proteins, most notably Beta-catenin. Phosphorylated residues on Beta-Catenin, such as S33 and S37, promote ubiquitination and degradation. Wnt signaling blocks residue phosphorylation and stabilizes Beta-catenin, allowing the protein to engage transcription factors like LEF and TCF1/2/3, promoting expression of target genes, and leading to increased cell proliferation. Applicants tested a panel of guides against residues known to be involved in phosphorylation of Beta-catenin and found editing levels between 5%-28% (FIG. 76F), resulting in up to 5-fold activation of Beta-catenin (FIG. 76G) as measured by a TCF/LEF-dependent luciferase reporter. Correspondingly, cells transfected with RESCUEv16 targeting phosphorylation sites resulted in a 40% increase in cell growth in the most activated Beta-catenin condition, targeting the T41I conversion (FIG. 76H).

[1307] RESCUEv16 is a programmable base editing tool capable of precise cytidine to uridine conversion in RNA. Using directed evolution, Applicants demonstrated that adenosine deaminases can be relaxed to accept other bases, resulting in a novel cytidine deamination mechanism on that can edit double stranded RNA via base-flipping. Applicants have been able to boost the cytidine deaminase activity of ADAR2dd 1,000 fold, resulting in up to 40% editing on endogenous transcripts. Further rounds of evolution may be performed to boost the activity even more. The larger targetable amino acid space of RESCUE's cytidine deamination activity increased possible modulation of post-translational modifications, such as phosphorylation, glycosylation, and methylation sites, as well as better targeting common catalytic residues (FIGS. 95A-95B). Moreover, cytidine deamination activity allows for expanded targeting of disease-associated mutations with RNA editing and generation of protective alleles, such as ApoE2. Overall, RESCUE extended the RNA targeting toolkit with new base editing functionality, allowing for better modeling and treatment of genetic disease.

[1308] RESCUE v16S was able to effectively edit endogenous genes (FIG. 96). RESCUE v165 maintained some A to I activity (FIG. 97). RESCUE v16 was used to target STAT to reduce INFγ/IL6 induction (FIG. 98). RESCUE targeting induces cell growth (FIGS. 99A-99B).

[1309] Materials and Method

[1310] Design and Cloning of Yeast Constructs

[1311] For expression of the dRanCas13b-hADAR2dd construct in yeast, the fusion protein was cloned downstream of a pGAL promoter in a pRSII426 backbone, by modifying pML104 (Addgene #67638). To improve expression, a GS linker was cloned between the fusion proteins, and ADAR2dd was codon optimized for yeast. Additional codon mutations, corresponding to iterations of RESCUE, were introduced via Gibson Cloning.

[1312] Targeting plasmids for testing activity in yeast were engineered for both fluorescent screens (GFP) and auxotrophic selection screens (His). All targeting plasmids were cloned into the pYES3/CT backbone (Thermo Scientific). All plasmids contained a RanCas13b guide cassette for RESCUE, with expression driven by the ADH1 promoter, and spacer and DR sequences flanked by HH and HDV ribozymes [cite ng and dean]. A construct with the spacer replaced by a golden gate site was cloned to facilitate modular guide cloning.

[1313] To generate a GFP indicator of C to U RNA editing activity, the Y66H green-to-blue mutation was introduced into a yeast codon optimized EGFP (yeGFP) driven by the TEF promoter. Successful C to U RNA editing restores the green fluorescence of this construct. His reporters for C to U editing were generated by testing conserved residues in HIS3 for loss of activity when mutated to residues that could be rescued by RNA editing. Mutations that created inactive HIS3 were cloned into a HIS3 gene, under its native HIS3 promoter, in the pYES3/CT backbone.

[1314] Generation of Mutagenesis Libraries for Yeast Screening

[1315] To generate mutagenesis libraries for screening mutations in yeast systems, the hADAR2 deaminase domain was mutated using Genemorph II (Agilent Technologies) for error-prone PCR across eight 50 mL reactions differing in template input from 74 ng-9.4m via a two-fold dilution series. Following amplification, reactions were pooled, diluted 1:4 in DI water and loaded into a 2% gel containing ethidium bromide. Extracted samples were purified using a MinElute PCR Purification Kit (Qiagen) before treatment with Dpn1 (Thermo Fisher Scientific) at 37° C. for 2h to remove residual template plasmid and subsequent gel and MinElute purification.

[1316] Backbone was generated by digesting 7 μg of template plasmid with KflI, RruI, and Eco72I (Thermo Fisher Scientific) for 1 hr. The digest was gel purified with the MinElute PCR Purification kit and eluted in 30 μL of pre-warmed water.

[1317] The purified PCR insert and digested backbone were ligated using Gibson Assembly (New England Biosciences), specifically, 456 ng of PCR insert and 800 ng of backbone digest were run in an 80 μL Gibson reaction for 1 hr. The product was condensed using isopropanol precipitation and resuspended in 12 μL of TE-EF redissolving buffer (Macherey-Nagel) and heating to 50° C. for 5 minutes while shaking at 300 r.p.m. 50 μL of Endura Electrocompetent cells (Lucigen) were thawed on ice for 10 minutes and 2 μL of resuspended Gibson product was added. The mixture was electroporated using a GenePulser Xcell (Bio-Rad) following optimal Endura settings (1.0 mm cuvette, 10 g, 600 Ohms, and 1800 Volts). Samples from each electroporation were recovered in 1 mL of Recovery Media (Lucigen) and incubated at 37° C. for 1 hr while shaking at 300 r.p.m. Two electroporations were performed per mutagenesis library. The recovered culture was plated on a large pre-warmed 100 μg/mL ampicillin plate. Serial dilutions were prepared to determine the c.f.u. of each library. Plates were incubated at 37° C. for 16 hr and harvested using the Nucleobond Xtra Maxi Kit (Macherey-Nagel).

[1318] Transformation of Mutagenesis Libraries in Yeast

[1319] Large scale yeast transformation was carried out as previously described. Briefly, colonies containing the Y66H EGFP or HIS3 reporter plasmids were picked into 300 mL-Trp 2% glucose selection media and grown up overnight at 30° C. After growth, the OD600 of the cells were determined and 2.5e9 cells were added to 500 mL of pre-warmed 2×YPAD and incubated for 4 hours at 30° C. The cell pellet was washed multiple times and then resuspended in 36 mL of transformation mix containing 24 mL of PEG 3350 (50% w/v), 3.6 mL of 1.0 M Lithium acetate, 5 mL of denatured single-stranded carrier salmon sperm DNA at 2.0 mg/mL (ThermoFisher Scientific), 2.9 mL of water, and 500 μL of 1 μg/μL plasmid library. After incubation at 42° C. for 60 minutes, the cell pellet was resuspended in 750 mL of -Ura/-Trp 2% glucose selection media and grown overnight until the culture reached OD600 of 5-6. At that point, 6 mL of the culture was seeded into 250 mL of 2% raffinose -Ura/-Trp selection media and incubated until the OD600 was 0.5-1. Cultures were induced by adding 27 mL of 30% galactose and incubated overnight at 30° C. for 12-14 hours. Cells were then either subjected to cell sorting or plating on selection plates, as described below.

[1320] Fluorescent Cell Sorting of Yeast Libraries

[1321] After induction, cells were sorted on a SH800S Cell Sorter by gating for EGFP fluorescence compared to a negative non-induced and non-targeting guide control. After 100 million cells had been sorted into 2% glucose -Ura/-Trp selection media, Applicants incubated the sorted cells overnight, and then seeded them into 2% raffinose -Ura/-Trp selection media when their OD600 was 5-6. Cells were then induced when the OD600 was between 0.5-1 and incubated overnight for 12-14 hours before sorting again. Sorting was performed until 10-20 million cells had been sorted. The iterative growth and sorting was repeated 2-3 additional times and each iteration of sorted cells was plasmid harvested and sequenced by Ilumina NextSeq next generation sequencing to ascertain the mutants present at each round of selection. Top enriched mutants were individually ordered and cloned for mammalian validation testing as described below.

[1322] His Growth Selection of Yeast Libraries

[1323] After induction, the cell library was plated on 2% raffinose/3% galactose -Ura/-Trp/-His selection plates. As colonies grew, they were picked into water and streaked on 2% raffinose/3% galactose -Ura/-Trp/-His selection plates. After overnight growth of the streaks, colony PCR was performed on each streak and subjected to sanger sequencing of the ADAR2 catalytic domain as well as the His gene to check for recombination and DNA mutagenesis. Mutations were individually ordered and cloned for mammalian validation testing as described below.

[1324] Design and Cloning of Mammalian Constructs for RNA Editing

[1325] RanCas13b was made catalytically inactive (dRanCas13b) via histidine to alanine and arginine to alanine mutations (R142A/H147A/R1039A/H1044A) at the catalytic site of the HEPN domains. The deaminase domain and ADAR2 were synthesized and PCR amplified for Gibson cloning into pcDNA-CMV vector backbones and were fused to dRanCas13b at the C-terminus via a GS-mapkNES-GS (GSSLQKKLEELELGS (SEQ ID NO:309)) linker. Mutations in the ADAR2 deaminase domain for altering cytosine deamination activity or specificity were introduced by Gibson cloning into the dRanCas13b-GS-mapkNES-GS-ADAR2dd backbone. All mutations introduced into ADAR2dd for evolving C to U editing are listed in Table 25.

[1326] For comparison between different Cas13b orthologs, mutations tested on the dRanCas13b backbone were transferred to a dPspCas13b fusion vector by Gibson cloning onto the REPAIR construct, dPspCas13b-GS-HIVNES-GS-ADAR2dd. For testing the ADAR2dd alone without dRanCas13b and the full length ADAR2, Applicants used Gibson cloning to add all mutations to pcDNA-CMV vector backbones with ADAR2dd or full length ADAR2, previously cloned to test REPAIR.

[1327] Luciferase reporter vectors for measuring C to U RNA editing activity were generated by screening potential mutations in Gluc in the previously reported luciferase reporter plasmid. This reporter vector expresses functional Cluc as a normalization control, but a defective Gluc due to the addition of mutants (either C82R or L77P). To test RESCUE editing motif preferences, Applicants cloned every possible motif around the cytosine at codon 82 (AAX CXC) of Gluc. Secreted luciferase reporter vectors for testing CTNNB1 editing efficiency were generated from M50 Super 8× TOPFlash (Addgene #12456) and M50 Super 8× FOPFlash (Addgene #12457). The original firefly luciferase, under control of either TCF/LEF responsive elements (TOPFlash) or mock binding sites (FOPFlash) was replaced with a secreted Gaussia luciferase via Gibson cloning. An additional Cypridina luciferase with expression drive by a CMV promoter was cloned in to serve as a transfection control. All mammalian plasmids are listed in Table 22.

[1328] Selection of RESCUE Versions in Mammalian Cells

[1329] Mutations that performed comparable or better to the existing version of RESCUE were selected for screening on the entire panel of 6 luciferase reporters. For the selection of RESCUE v4 through v10, candidate mutations were initially screened on TCG motifs; RESCUE v11 was isolated using GCG motifs as the initial screening. Selection of RESCUE v12 through v14 were validated in mammalian cells using an initial screening on editing of the T41I residue of endogenous CTNNB1, resulting in beta-catenin pathway activation that was profiled with luminescent reporters of pathway activity, and RESCUE v15 and v16 were selected via activity on the L77P CCT motif of Gluc. All rounds and yeast screens used to generate them are listed in Table 25.

[1330] Cloning Pathogenic U>C Mutations for Assaying RESCUE Activity

[1331] To generate disease-relevant mutations for testing REPAIR activity, 23 U>C mutations related to disease pathogenesis, as defined in ClinVar, were selected (grouped as a panel of 22 genes and ApoE independently). Selected targets were ordered from Integrated DNA Technologies as 200-bp regions surrounding the mutation site, and were cloned downstream of mScarlet under a Eflalpha promoter.

[1332] Guide Cloning for RESCUE

[1333] For expression of mammalian guide RNAs for RESCUE, a previously described construct with a RanCas13b direct repeat sequence preceded by golden-gate acceptor sites under U6 expression was used. Individual guides were cloned into this expression backbone by golden-gate cloning. To determine optimal guides for select sites, both C and U flips were tested, as well as tiling guides around the most common optimal guide range (mismatch distance of ˜24).

[1334] Guide sequences for RESCUE experiments, all yeast plasmids, and all targeting guides used in yeast experiments are listed in Tables 21-26.

TABLE 21
Guide sequences used for luciferase editing

| | | | Base | | | |
|---|---|---|---|---|---|---|
| | | | flip/spacer | | | |
| | Targeted | | length/ | Codon | | |
| Name | gene | Motif | position | change | Spacer sequence | Notes |
| UCG | Gluc | UCG | C/30/26 | C82R | gugcCauugaugugggaca | No 5′ G |
| targeting | | | | | ggcagaucaga (SEQ | |
| guide | | | | | ID NO: 310) | |
| GCG | Gluc | GCG | U/30/20 | C82R | Guugggcgugcucuugaug | |
| targeting | | | | | ugggacaggcag (SEQ | |
| guide | | | | | ID NO: 311) | |
| ACG | Gluc | ACG | C/30/28 | C82R | Ggccuuugaugugggacag | |
| targeting | | | | | gcagaucagaca (SEQ | |
| guide | | | | | ID NO: 312) | |
| CCG | Gluc | CCG | C/30/26 | C82R | Gugccguugaugugggaca | No 5′ G |
| targeting | | | | | ggcagaucaga (SEQ | |
| guide | | | | | ID NO: 313) | |
| CCU | Gluc | CCU | C/30/26 | L77P | Gggaacggcagaucagaca | |
| targeting | | | | | gccccuggugca (SEQ | |
| | | | | | ID NO: 314) | |
| CCA | Gluc | CCA | C/30/26 | L77P | Gggauuggcagaucagaca | |
| targeting | | | | | gccccuggugca (SEQ | |
| | | | | | ID NO: 315) | |
| Motif guide | Gluc | UCU | U/30/26 | L82F | gugaUauugaugugggaca | |
| UCU, flip U | | | | | ggcagaucaga (SEQ | |
| | | | | | ID NO: 316) | |
| Motif guide | Gluc | UCG | U/30/26 | C82R | gugcUauugaugugggaca | |
| UCG, flip U | | | | | ggcagaucaga (SEQ | |
| | | | | | ID NO: 317) | |
| Motif guide | Gluc | UCC | U/30/26 | P82S | guggUauugaugugggaca | |
| UCC, flip U | | | | | ggcagaucaga (SEQ | |
| | | | | | ID NO: 318) | |
| Motif guide | Gluc | UCA | U/30/26 | H82Y | guguUauugaugugggaca | |
| UCA, flip U | | | | | ggcagaucaga (SEQ | |
| | | | | | ID NO: 319) | |
| Motif guide | Gluc | ACU | U/30/26 | L82F | gugaUuuugaugugggaca | |
| ACU, flip U | | | | | ggcagaucaga (SEQ | |
| | | | | | ID NO: 320) | |
| Motif guide | Gluc | ACG | U/30/26 | C82R | gugcUuuugaugugggaca | |
| ACG, flip U | | | | | ggcagaucaga (SEQ | |
| | | | | | ID NO: 321) | |
| Motif guide | Gluc | ACC | U/30/26 | P82S | guggUuuugaugugggaca | |
| ACC, flip U | | | | | ggcagaucaga (SEQ | |
| | | | | | ID NO: 322) | |
| Motif guide | Gluc | ACA | U/30/26 | H82Y | guguUuuugaugugggaca | |
| ACA, flip U | | | | | ggcagaucaga (SEQ | |
| | | | | | ID NO: 323) | |
| Motif guide | Gluc | GCU | U/30/26 | L82F | gugaUcuugaugugggaca | |
| GCU, flip U | | | | | ggcagaucaga (SEQ | |
| | | | | | ID NO: 324) | |
| Motif guide | Gluc | GCG | U/30/26 | C82R | gugcUcuugaugugggaca | |
| GCG, flip U | | | | | ggcagaucaga (SEQ | |
| | | | | | ID NO: 325) | |
| Motif guide | Gluc | GCC | U/30/26 | P82S | guggUcuugaugugggaca | |
| GCC, flip U | | | | | ggcagaucaga (SEQ | |
| | | | | | ID NO: 326) | |
| Motif guide | Gluc | GCA | U/30/26 | H82Y | guguUcuugaugugggaca | |
| GCA, flip U | | | | | ggcagaucaga (SEQ | |
| | | | | | ID NO: 327) | |
| Motif guide | Gluc | CCU | U/30/26 | L82F | gugaUguugaugugggaca | |
| CCU, flip U | | | | | ggcagaucaga (SEQ | |
| | | | | | ID NO: 328) | |
| Motif guide | Gluc | CCG | U/30/26 | C82R | gugcUguugaugugggaca | |
| CCG, flip U | | | | | ggcagaucaga (SEQ | |
| | | | | | ID NO: 329) | |
| Motif guide | Gluc | CCC | U/30/26 | P82S | guggUguugaugugggaca | |
| CCC, flip U | | | | | ggcagaucaga (SEQ | |
| | | | | | ID NO: 330) | |
| Motif guide | Gluc | CCA | U/30/26 | H82Y | guguUguugaugugggaca | |
| CCA, flip U | | | | | ggcagaucaga (SEQ | |
| | | | | | ID NO: 331) | |
| Motif guide | Gluc | UCU | C/30/26 | L82F | gugaCauugaugugggaca | |
| UCU, flip C | | | | | ggcagaucaga (SEQ | |
| | | | | | ID NO: 332) | |
| Motif guide | Gluc | UCC | C/30/26 | P82S | guggCauugaugugggaca | |
| UCC, flip C | | | | | ggcagaucaga (SEQ | |
| | | | | | ID NO: 333) | |
| Motif guide | Gluc | UCA | C/30/26 | H82Y | guguCauugaugugggaca | |
| UCA, flip C | | | | | ggcagaucaga (SEQ | |
| | | | | | ID NO: 334) | |
| Motif guide | Gluc | ACU | C/30/26 | L82F | gugaCuuugaugugggaca | |
| ACU, flip C | | | | | ggcagaucaga (SEQ | |
| | | | | | ID NO: 335) | |
| Motif guide | Gluc | ACG | C/30/26 | C82R | gugcCuuugaugugggaca | |
| ACG, flip C | | | | | ggcagaucaga (SEQ | |
| | | | | | ID NO: 336) | |
| Motif guide | Gluc | ACC | C/30/26 | P82S | guggCuuugaugugggaca | |
| ACC, flip C | | | | | ggcagaucaga (SEQ | |
| | | | | | ID NO: 337) | |
| Motif guide | Gluc | ACA | C/30/26 | H82Y | guguCuuugaugugggaca | |
| ACA, flip C | | | | | ggcagaucaga (SEQ | |
| | | | | | ID NO: 338) | |
| Motif guide | Gluc | GCU | C/30/26 | L82F | gugaCcuugaugugggaca | |
| GCU, flip C | | | | | ggcagaucaga (SEQ | |
| | | | | | ID NO: 339) | |
| Motif guide | Gluc | GCG | C/30/26 | C82R | gugcCcuugaugugggaca | |
| GCG, flip C | | | | | ggcagaucaga (SEQ | |
| | | | | | ID NO: 340) | |
| Motif guide | Gluc | GCC | C/30/26 | P82S | guggCcuugaugugggaca | |
| GCC, flip C | | | | | ggcagaucaga (SEQ | |
| | | | | | ID NO: 341) | |
| Motif guide | Gluc | GCA | C/30/26 | H82Y | guguCcuugaugugggaca | |
| GCA, flip C | | | | | ggcagaucaga (SEQ | |
| | | | | | ID NO: 342) | |
| Motif guide | Gluc | CCU | C/30/26 | L82F | gugaCguugaugugggaca | |
| CCU, flip C | | | | | ggcagaucaga (SEQ | |
| | | | | | ID NO: 343) | |
| Motif guide | Gluc | CCC | C/30/26 | P82S | guggCguugaugugggaca | |
| CCC, flip C | | | | | ggcagaucaga (SEQ | |
| | | | | | ID NO: 344) | |
| Motif guide | Gluc | CCA | C/30/26 | H82Y | guguCguugaugugggaca | |
| CCA, flip C | | | | | ggcagaucaga (SEQ | |
| | | | | | ID NO: 345) | |
| Non-targeting | N/A | N/A | N/A | N/A | Guaaugccuggcuugucga | |
| guide | | | | | cgcauagucug (SEQ | |
| | | | | | ID NO: 346) | |
| Gluc | Gluc | UCG | C/30/26 | C82R | ggugcuaGugaugugggac | Additional |
| specificity | | | | | aggcagaucaga (SEQ | G added |
| guide with | | | | | ID NO: 347) | specificity |
| off-target A- | | | | | | |
| G mismatch 1 | | | | | | |
| Gluc | Gluc | UCG | C/30/26 | C82R | ggugcuauGgaugugggac | Additional |
| specificity | | | | | aggcagaucaga (SEQ | G added |
| guide with | | | | | ID NO: 348) | specificity |
| off-target A- | | | | | | |
| G mismatch 2 | | | | | | |
| Gluc | Gluc | UCG | C/30/26 | C82R | ggugcuauugaugGgggac | Additional |
| specificity | | | | | aggcagaucaga (SEQ | G added |
| guide with | | | | | ID NO: 349) | specificity |
| off-target A- | | | | | | |
| G mismatch 3 | | | | | | |
| Gluc | Gluc | UCG | C/30/26 | C82R | ggugcuaGGgaugugggac | Additional |
| specificity | | | | | aggcagaucaga (SEQ | G added |
| guide with | | | | | D NO: 350) | specificity |
| off-target A- | | | | | | |
| G combo 1 + 2 | | | | | | |
| Gluc | Gluc | UCG | C/30/26 | C82R | ggugcuaGGgaugGgggac | Additional |
| specificity | | | | | aggcagaucaga (SEQ | G added |
| guide with | | | | | ID NO: 351) | specificity |
| off-target A- | | | | | | |
| G combo all | | | | | | |
| A to I | Cluc | TAG | C/50/34 | *85w | Gcgcccugugcggacuccu | |
| REPAIR | | | | | ugucgccuucguaggugug | |
| guide | | | | | gcagcguccuggg | |
| | | | | | (SEQ ID NO: 352) | |
| Tiling guide | Gluc | UCG | U/30/30 | C82R | Guauugaugugggacaggc | |
| 30 flip 30 U | | | | | agaucagacagc (SEQ | |
| | | | | | ID NO: 353) | |
| Tiling guide | Gluc | UCG | U/30/28 | C82R | Ggcuauugaugugggacag | |
| 30 flip 28 U | | | | | gcagaucagaca (SEQ | |
| | | | | | ID NO: 354) | |
| Tiling guide | Gluc | UCG | U/30/26 | C82R | Ggugcuauugaugugggac | |
| 30 flip 26 U | | | | | aggcagaucaga (SEQ | |
| | | | | | ID NO: 355) | |
| Tiling guide | Gluc | UCG | U/30/24 | C82R | Ggcgugcuauugauguggg | |
| 30 flip 24 U | | | | | acaggcagauca (SEQ | |
| | | | | | ID NO: 356) | |
| Tiling guide | Gluc | UCG | U/30/22 | C82R | Ggggcgugcuauugaugug | |
| 30 flip 22 U | | | | | ggacaggcagau (SEQ | |
| | | | | | ID NO: 357) | |
| Tiling guide | Gluc | UCG | U/30/20 | C82R | Guugggcgugcuauugaug | |
| 30 flip 20 U | | | | | ugggacaggcag (SEQ | |
| | | | | | ID NO: 358) | |
| Tiling guide | Gluc | UCG | U/30/18 | C82R | Gucuugggcgugcuauuga | |
| 30 flip 18 U | | | | | ugugggacaggc (SEQ | |
| | | | | | ID NO: 359) | |
| Tiling guide | Gluc | UCG | U/30/16 | C82R | Gcaucuugggcgugcuauu | |
| 30 flip 16 U | | | | | gaugugggacag (SEQ | |
| | | | | | ID NO: 360) | |
| Tiling guide | Gluc | UCG | U/30/14 | C82R | Guucaucuugggcgugcua | |
| 30 flip 14 U | | | | | uugaugugggac (SEQ | |
| | | | | | ID NO: 361) | |
| Tiling guide | Gluc | UCG | U/30/12 | C82R | Gucuucaucuugggcgugc | |
| 30 flip 12 U | | | | | uauugauguggg (SEQ | |
| | | | | | ID NO: 362) | |
| Tiling guide | Gluc | UCG | U/30/10 | C82R | Gcuucuucaucuugggcgu | |
| 30 flip 10 U | | | | | gcuauugaugug (SEQ | |
| | | | | | ID NO: 363) | |
| Tiling guide | Gluc | UCG | U/30/8 | C82R | Gaacuucuucaucuugggc | |
| 30 flip 8 U | | | | | gugcuauugaug (SEQ | |
| | | | | | ID NO: 364) | |
| Tiling guide | Gluc | UCG | U/30/6 | C82R | Gugaacuucuucaucuugg | |
| 30 flip 6 U | | | | | gcgugcuauuga (SEQ | |
| | | | | | ID NO: 365) | |
| Tiling guide | Gluc | UCG | U/30/4 | C82R | Ggaugaacuucuucaucuu | |
| 30 flip 4 U | | | | | gggcgugcuauu (SEQ | |
| | | | | | ID NO: 366) | |
| Tiling guide | Gluc | UCG | U/30/2 | C82R | Ggggaugaacuucuucauc | |
| 30 flip 2 U | | | | | ugggcgugcua (SEQ | |
| | | | | | ID NO: 367) | |
| Tiling guide | Gluc | UCG | U/50/50 | C82R | Guauugaugugggacaggc | |
| 50 flip 50 U | | | | | agaucagacagccccuggu | |
| | | | | | gcagccagcuuuc | |
| | | | | | (SEQ ID NO: 368) | |
| Tiling guide | Gluc | UCG | U/50/48 | C82R | Ggcuauugaugugggacag | |
| 50 flip 48 U | | | | | gcagaucagacagccccug | |
| | | | | | gugcagccagcuu | |
| | | | | | (SEQ ID NO: 369) | |
| Tiling guide | Gluc | UCG | U/50/46 | C82R | Ggugcuauugaugugggac | |
| 50 flip 46 U | | | | | aggcagaucagacagcccc | |
| | | | | | uggugcagccagc | |
| | | | | | (SEQ ID NO: 370) | |
| Tiling guide | Gluc | UCG | U/50/44 | C82R | Ggcgugcuauugauguggg | |
| 50 flip 44 U | | | | | acaggcagaucagacagcc | |
| | | | | | ccuggugcagcca | |
| | | | | | (SEQ ID NO: 371) | |
| Tiling guide | Gluc | UCG | U/50/42 | C82R | Ggggcgugcuauugaugug | |
| 50 flip 42 U | | | | | ggacaggcagaucagacag | |
| | | | | | ccccuggugcagc | |
| | | | | | (SEQ ID NO: 372) | |
| Tiling guide | Gluc | UCG | U/50/40 | C82R | Guugggcgugcuauugaug | |
| 50 flip 40 U | | | | | ugggacaggcagaucagac | |
| | | | | | agccccuggugca | |
| | | | | | (SEQ ID NO: 373) | |
| Tiling guide | Gluc | UCG | U/50/38 | C82R | Gucuugggcgugcuauuga | |
| 50 flip 38 U | | | | | ugugggacaggcagaucag | |
| | | | | | acagccccuggug | |
| | | | | | (SEQ ID NO: 374) | |

TABLE 22
Guide sequences used for endogenous gene editing

| | | | Base | | |
|---|---|---|---|---|---|
| | Targeted | | flip/ | Codon | |
| Name | gene | Motif | position | change | Spacer sequence |
| S33F_CTNNB1_30bp_guide_30_9 | CTNNB1 | UCU | 22 | S33F | GGGAUUCCACAGUCCA |
| C flip | | | | | GGUAAGACUGUUGCU |
| | | | | | (SEQ ID |
| | | | | | NO: 375) |
| H36Y_CTNNB1_30bp_guide_30_9 | CTNNB1 | CCA | 22 | H36Y | GACCAGAAUUGAUUCC |
| T flip | | | | | AGAGUCCAGGUAAGA |
| | | | | | (SEQ ID |
| | | | | | NO: 376) |
| S37F_CTNNB1_30bp_guide_30_9 | CTNNB1 | UCU | 22 | 537F | GUGGCACCAUAAUGGA |
| T flip | | | | | UUCCAGAGUCCAGGU |
| | | | | | (SEQ ID |
| | | | | | NO: 377) |
| T41I_CTNNB1_30bp_guide_30_11 | CTNNB1 | ACC | 20 | T41I | GAGGAGCUGUGUUAGU |
| T flip | | | | | GGCACCAGAAUGGAU |
| | | | | | (SEQ ID |
| | | | | | NO: 378) |
| P44L_CTNNB1_30bp_guide_30_9 | CTNNB1 | CCU | 22 | P44L | GUCAGAGAACGAGCUG |
| C flip | | | | | UGGUAGUGGCACCAG |
| | | | | | (SEQ ID |
| | | | | | NO: 379) |
| P44S_CTNNB1_30bp_guide_30_11 | CTNNB1 | UCU | 20 | P44S | GCUCAGAGAAGUAGCU |
| T flip | | | | | GUGGUAGUGGCACCA |
| | | | | | (SEQ ID |
| | | | | | NO: 380) |
| S45F_CTNNB1_30bp_guide_30_11 | CTNNB1 | UCU | 20 | S45F | GACCACUCAGACAAGG |
| C flip | | | | | AGCUGUGGUAGUGGC |
| | | | | | (SEQ ID |
| | | | | | NO: 381) |
| TCG_KRAS_30bp_guide_30_7 | KRAS | UCG | 24 | L56L | GUGUGUCUAGAAUAUC |
| T flip | | | | | CAAGAGACAGGUUUC |
| | | | | | (SEQ ID |
| | | | | | NO: 382) |
| ACG_KRAS_30bp_guide_30_11 | KRAS | ACG | 20 | D30D | GGAUCAUAUUCCUCCA |
| C flip | | | | | CAAAAUGAUUCUGAA |
| | | | | | (SEQ ID |
| | | | | | NO: 383) |
| GCG_KRAS_30bp_guide_30_11 | KRAS | GCG | 20 | G13G | GUCUUGCCUACUCCAC |
| T flip | | | | | CAGCUCCAACUACCA |
| | | | | | (SEQ ID |
| | | | | | NO: 384) |
| CCT_KRAS_30bp_guide_30_11 | KRAS | CCU | 20 | A18A | GGUAUCGUCAACGCAC |
| C flip | | | | | UCUUGCCUACGCCAC |
| | | | | | (SEQ ID |
| | | | | | NO: 385) |
| TCG_PPIB_30bp_guide_30_11 | PPIB | UCG | 20 | I18I | GCGGACCCCGCUAUGA |
| T flip | | | | | GGGCGGCGGCAAGGA |
| | | | | | (SEQ ID |
| | | | | | NO: 386) |
| ACG_PPIB_30bp_guide_30_7 | PPIB | ACG | 24 | R7C | GAUAUUCCUCCACAAA |
| C flip | | | | | AUGAUUCUGAAUUAG |
| | | | | | (SEQ ID |
| | | | | | NO: 387) |
| GCG_PPIB_30bp_guide_30_11 | PPIB | GCG | 20 | A19V | GGACGGACCCCUCGAU |
| T flip | | | | | GAGGGCGGCGGCAAG |
| | | | | | (SEQ ID |
| | | | | | NO: 388) |
| CCG_PPIB_30bp_guide_30_11 | PPIB | CCG | 20 | S21S | GGGAAGAAGACCGACC |
| C flip | | | | | CCGCGAUGAGGGCGG |
| | | | | | (SEQ ID |
| | | | | | NO: 389) |
| TCG_SMARCA4_30bp_guide_30_9 | SMARCA4 | UCG | 22 | S85L | GGGUCGUCCUACAUGC |
| T flip | | | | | CCUUCUCAUGCAUGG |
| | | | | | (SEQ ID |
| | | | | | NO: 390) |
| ACG_SMARCA4_30bp_guide_30_11 | SMARCA4 | ACG | 20 | D86D | GAGCGCGGGUCUUCCG |
| T flip | | | | | ACAUGCCCUUCUCAU |
| | | | | | (SEQ ID |
| | | | | | NO: 391) |
| GCG_SMARCA4_30bp_guide_30_11 | SMARCA4 | GCG | 20 | R89C | GUGGUUGUAGCCCGGG |
| C flip | | | | | UCGUCCGACAUGCCC |
| | | | | | (SEQ ID |
| | | | | | NO: 392) |
| CCG_SMARCA4_30bp_guide_30_11 | SMARCA4 | CCG | 20 | P88L | GGUUGUAGCGCUGGUC |
| T flip | | | | | GUCCGACAUGCCCUU |
| | | | | | (SEQ ID |
| | | | | | NO: 393) |
| NRAS_C- | NRAS | UCC | 20 | I211 | GGGAUUAGCUGCAUUG |
| flip_guide_30_11 | | | | | UCAGUGCGCUUUUCC |
| | | | | | (SEQ ID |
| | | | | | NO: 394) |
| NKFB1_T- | NFKB | ACC | 20 | P33S | GGCCAUCUGUGUUUGA |
| flip_guide_30_11 | | | | | AAUACUUCUGGAUUA |
| | | | | | (SEQ ID |
| | | | | | NO: 395) |
| EZH2_T- | EZH2 | UCA | 20 | F32F | GCAGCUCGUCUUAACC |
| flip_guide_30_11 | | | | | UCUUGAGCUGUCUCA |
| | | | | | (SEQ ID |
| | | | | | NO: 396) |
| NF2_T- | NF2 | ACG | 24 | T21M | GGUGAACUUCUUGGGU |
| flip_guide_30_7 | | | | | UGCUUCCUCUUGAGA |
| | | | | | (SEQ ID |
| | | | | | NO: 397) |
| RAF1_T- | RAF1 | UCC | 24 | P30S | GUUGUAGUAGAGAUGC |
| flip_guide_30_7 | | | | | AGCUGGAGCCAUCAA |
| | | | | | (SEQ ID |
| | | | | | NO: 398) |
| STAT3_Y705C- | STAT3 | UAC | 34 | Y705C | GAAACUUGGUCUUCAG |
| flip_50_17 | | | | | GCAUGGGGCAGCGCUA |
| | | | | | CCUGGGUCAGCUUCAG |
| | | | | | GAU (SEQ ID |
| | | | | | NO: 399) |
| STAT3_S727C- | STAT3 | UCC | 22 | S727F | GUGCGGGGGCACAUCG |
| flip_30_9 | | | | | GCAGGUCAAUGGUAU |
| | | | | | (SEQ ID |
| | | | | | NO: 400) |
| STAT1_Y701C- | STAT1 | UAU | 34 | Y705C | GCAACUCAGUCUUGAU |
| flip_50_17 | | | | | ACAUCCAGUUCCUUUA |
| | | | | | GGGCCAUCAAGUUCCA |
| | | | | | UUG (SEQ ID |
| | | | | | NO: 401) |
| STAT1_S727C- | STAT1 | UCC | 22 | S727F | GCCUCAGGACACAUGG |
| flip_30_9 | | | | | GGAGCAGGUUGUCUG |
| | | | | | (SEQ ID |
| | | | | | NO: 402) |
| S33F_CTNNB1_30bp_guide_U- | CTNNB1 | UCU | 24 | S33F | GAUUCCAUAGUCCAGG |
| flip_30_7 | | | | | UAAGACUGUUGCUGC |
| | | | | | (SEQ ID |
| | | | | | NO: 403) |
| S33F_CTNNB1_30bp_guide_U- | CTNNB1 | UCU | 22 | S33F | GGGAUUCCAUAGUCCA |
| flip_30_9 | | | | | GGUAAGACUGUUGCU |
| | | | | | (SEQ ID |
| | | | | | NO: 404) |
| S33F_CTNNB1_30bp_guide_U- | CTNNB1 | UCU | 20 | S33F | GAUGGAUUCCAUAGUC |
| flip_30_11 | | | | | CAGGUAAGACUGUUG |
| | | | | | (SEQ ID |
| | | | | | NO: 405) |
| S33F_CTNNB1_30bp_guide_U- | CTNNB1 | UCU | 18 | S33F | GGAAUGGAUUCCAUAG |
| flip_30_13 | | | | | UCCAGGUAAGACUGU |
| | | | | | (SEQ ID |
| | | | | | NO: 406) |
| H36Y_CTNNB1_30bp_guide_U- | CTNNB1 | CCA | 24 | H36Y | GCAGAAUUGAUUCCAG |
| flip_30_7 | | | | | AGUCCAGGUAAGACU |
| | | | | | (SEQ ID |
| | | | | | NO: 407) |
| H36Y_CTNNB1_30bp_guide_U- | CTNNB1 | CCA | 22 | H36Y | GACCAGAAUUGAUUCC |
| flip_30_9 | | | | | AGAGUCCAGGUAAGA |
| | | | | | (SEQ ID |
| | | | | | NO: 408) |
| H36Y_CTNNB1_30bp_guide_U- | CTNNB1 | CCA | 20 | H36Y | GGCACCAGAAUUGAUU |
| flip_30_11 | | | | | CCAGAGUCCAGGUAA |
| | | | | | (SEQ ID |
| | | | | | NO: 409) |
| H36Y_CTNNB1_30bp_guide_U- | CTNNB1 | CCA | 18 | H36Y | GUGGCACCAGAAUUGA |
| flip_30_13 | | | | | UUCCAGAGUCCAGGU |
| | | | | | (SEQ ID |
| | | | | | NO: 410) |
| S37F_CTNNB1_30bp_guide_U- | CTNNB1 | UCU | 24 | S37F | GGCACCAUAAUGGAUU |
| flip_30_7 | | | | | CCAGAGUCCAGGUAA |
| | | | | | (SEQ ID |
| | | | | | NO: 411) |
| S37F_CTNNB1_30bp_guide_U- | CTNNB1 | UCU | 22 | S37F | GUGGCACCAUAAUGGA |
| flip_30_9 | | | | | UUCCAGAGUCCAGGU |
| | | | | | (SEQ ID |
| | | | | | NO: 412) |
| S37F_CTNNB1_30bp_guide_U- | CTNNB1 | UCU | 20 | S37F | GAGUGGCACCAUAAUG |
| flip_30_11 | | | | | GAUUCCAGAGUCCAG |
| | | | | | (SEQ ID |
| | | | | | NO: 413) |
| S37F_CTNNB1_30bp_guide_U- | CTNNB1 | UCU | 18 | S37F | GGUAGUGGCACCAUAA |
| flip_30_13 | | | | | UGGAUUCCAGAGUCC |
| | | | | | (SEQ ID |
| | | | | | NO: 414) |
| T41I_CTNNB1_30bp_guide_U- | CTNNB1 | ACC | 24 | T41I | GGCUGUGUUAGUGGCA |
| flip_30_7 | | | | | CCAGAAUGGAUUCCA |
| | | | | | (SEQ ID |
| | | | | | NO: 415) |
| T41I_CTNNB1_30bp_guide_U- | CTNNB1 | ACC | 22 | T41I | GGAGCUGUGUUAGUGG |
| flip_30_9 | | | | | CACCAGAAUGGAUUC |
| | | | | | (SEQ ID |
| | | | | | NO: 416) |
| T41I_CTNNB1_30bp_guide_U- | CTNNB1 | ACC | 20 | T41I | GAGGAGCUGUGUUAGU |
| flip_30_11 | | | | | GGCACCAGAAUGGAU |
| | | | | | (SEQ ID |
| | | | | | NO: 417) |
| T41I_CTNNB1_30bp_guide_U- | CTNNB1 | ACC | 18 | T41I | GGAAGGAGCUGUGUUA |
| flip_30_13 | | | | | GUGGCACCAGAAUGG |
| | | | | | (SEQ ID |
| | | | | | NO: 418) |
| P44L_CTNNB1_30bp_guide_U- | CTNNB1 | CCU | 24 | P44L | GAGAGAAUGAGCUGUG |
| flip_30_7 | | | | | GUAGUGGCACCAGAA |
| | | | | | (SEQ ID |
| | | | | | NO: 419) |
| P44L_CTNNB1_30bp_guide_U- | CTNNB1 | CCU | 22 | P44L | GUCAGAGAAUGAGCUG |
| flip_30_9 | | | | | UGGUAGUGGCACCAG |
| | | | | | (SEQ ID |
| | | | | | NO: 420) |
| P44L_CTNNB1_30bp_guide_U- | CTNNB1 | CCU | 20 | P44L | GACUCAGAGAAUGAGC |
| flip_30_11 | | | | | UGUGGUAGUGGCACC |
| | | | | | (SEQ ID |
| | | | | | NO: 421) |
| P44L_CTNNB1_30bp_guide_U- | CTNNB1 | CCU | 18 | P44L | GCCACUCAGAGAAUGA |
| flip_30_13 | | | | | GCUGUGGUAGUGGCA |
| | | | | | (SEQ ID |
| | | | | | NO: 422) |
| P44S_CTNNB1_30bp_guide_U- | CTNNB1 | UCU | 24 | P44S | GGAGAAGUAGCUGUGG |
| flip_30_7 | | | | | UAGUGGCACCAGAAU |
| | | | | | (SEQ ID |
| | | | | | NO: 423) |
| P44S_CTNNB1_30bp_guide_U- | CTNNB1 | UCU | 22 | P44S | GCAGAGAAGUAGCUGU |
| flip_30_9 | | | | | GGUAGUGGCACCAGA |
| | | | | | (SEQ ID |
| | | | | | NO: 424) |
| P44S_CTNNB1_30bp_guide_U- | CTNNB1 | UCU | 20 | P44S | GCUCAGAGAAGUAGCU |
| flip_30_11 | | | | | GUGGUAGUGGCACCA |
| | | | | | (SEQ ID |
| | | | | | NO: 425) |
| P44S_CTNNB1_30bp_guide_U- | CTNNB1 | UCU | 18 | P44S | GCACUCAGAGAAGUAG |
| flip_30_13 | | | | | CUGUGGUAGUGGCAC |
| | | | | | (SEQ ID |
| | | | | | NO: 426) |
| S45F_CTNNB1_30bp_guide_U- | CTNNB1 | UCU | 24 | S45F | GCUCAGAUAAGGAGCU |
| flip_30_7 | | | | | GUGGUAGUGGCACCA |
| | | | | | (SEQ ID |
| | | | | | NO: 427) |
| S45F_CTNNB1_30bp_guide_U- | CTNNB1 | UCU | 22 | S45F | GCACUCAGAUAAGGAG |
| flip_30_9 | | | | | CUGUGGUAGUGGCAC |
| | | | | | (SEQ ID |
| | | | | | NO: 428) |
| S45F_CTNNB1_30bp_guide_U- | CTNNB1 | UCU | 20 | S45F | GACCACUCAGAUAAGG |
| flip_30_11 | | | | | AGCUGUGGUAGUGGC |
| | | | | | (SEQ ID |
| | | | | | NO: 429) |
| S45F_CTNNB1_30bp_guide_U- | CTNNB1 | UCU | 18 | S45F | GUUACCACUCAGAUAA |
| flip_30_13 | | | | | GGAGCUGUGGUAGUG |
| | | | | | (SEQ ID |
| | | | | | NO: 430) |
| TCG_KRAS_30bp_guide_U- | KRAS | UCG | 24 | L56L | GUGUGUCUAGAAUAUC |
| flip_30_7 | | | | | CAAGAGACAGGUUUC |
| | | | | | (SEQ ID |
| | | | | | NO: 431) |
| TCG_KRAS_30bp_guide_U- | KRAS | UCG | 22 | L56L | GGCUGUGUCUAGAAUA |
| flip_30_9 | | | | | UCCAAGAGACAGGUU |
| | | | | | (SEQ ID |
| | | | | | NO: 432) |
| TCG_KRAS_30bp_guide_U- | KRAS | UCG | 20 | L56L | GCUGCUGUGUCUAGAA |
| flip_30_11 | | | | | UAUCCAAGAGACAGG |
| | | | | | (SEQ ID |
| | | | | | NO: 433) |
| TCG_KRAS_30bp_guide_U- | KRAS | UCG | 18 | L56L | GACCUGCUGUGUCUAG |
| flip_30_13 | | | | | AAUAUCCAAGAGACA |
| | | | | | (SEQ ID |
| | | | | | NO: 434) |
| ACG_KRAS_30bp_guide_U- | KRAS | ACG | 24 | D30D | GAUAUUCUUCCACAAA |
| flip_30_7 | | | | | AUGAUUCUGAAUUAG |
| | | | | | (SEQ ID |
| | | | | | NO: 435) |
| ACG_KRAS_30bp_guide_U- | KRAS | ACG | 22 | D30D | GUCAUAUUCUUCCACA |
| flip_30_9 | | | | | AAAUGAUUCUGAAUU |
| | | | | | (SEQ ID |
| | | | | | NO: 436) |
| ACG_KRAS_30bp_guide_U- | KRAS | ACG | 20 | D30D | GGAUCAUAUUCUUCCA |
| flip_30_11 | | | | | CAAAAUGAUUCUGAA |
| | | | | | (SEQ ID |
| | | | | | NO: 437) |
| ACG_KRAS_30bp_guide_U- | KRAS | ACG | 18 | D30D | GUGGAUCAUAUUCUUC |
| flip_30_13 | | | | | CACAAAAUGAUUCUG |
| | | | | | (SEQ ID |
| | | | | | NO: 438) |
| GCG_KRAS_30bp_guide_U- | KRAS | GCG | 24 | G13G | GGCCUACUCCACCAGC |
| flip_30_7 | | | | | UCCAACUACCACAAG |
| | | | | | (SEQ ID |
| | | | | | NO: 439) |
| GCG_KRAS_30bp_guide_U- | KRAS | GCG | 22 | G13G | GUUGCCUACUCCACCA |
| flip_30_9 | | | | | GCUCCAACUACCACA |
| | | | | | (SEQ ID |
| | | | | | NO: 440) |
| GCG_KRAS_30bp_guide_U- | KRAS | GCG | 20 | G13G | GUCUUGCCUACUCCAC |
| flip_30_11 | | | | | CAGCUCCAACUACCA |
| | | | | | (SEQ ID |
| | | | | | NO: 441) |
| GCG_KRAS_30bp_guide_U- | KRAS | GCG | 18 | G13G | GACUCUUGCCUACUCC |
| flip_30_13 | | | | | ACCAGCUCCAACUAC |
| | | | | | (SEQ ID |
| | | | | | NO: 442) |
| CCT_KRAS_30bp_guide_U- | KRAS | CCU | 24 | A18A | GCGUCAAUGCACUCUU |
| flip_30_7 | | | | | GCCUACGCCACCAGC |
| | | | | | (SEQ ID |
| | | | | | NO: 443) |
| CCT_KRAS_30bp_guide_U- | KRAS | CCU | 22 | A18A | GAUCGUCAAUGCACUC |
| flip_30_9 | | | | | UUGCCUACGCCACCA |
| | | | | | (SEQ ID |
| | | | | | NO: 444) |
| CCT_KRAS_30bp_guide_U- | KRAS | CCU | 20 | A18A | GGUAUCGUCAAUGCAC |
| flip_30_11 | | | | | UCUUGCCUACGCCAC |
| | | | | | (SEQ ID |
| | | | | | NO: 445) |
| CCT_KRAS_30bp_guide_U- | KRAS | CCU | 18 | A18A | GCUGUAUCGUCAAUGC |
| flip_30_13 | | | | | ACUCUUGCCUACGCC |
| | | | | | (SEQ ID |
| | | | | | NO: 446) |
| TCG_PPIB_30bp_guide_U- | PPIB | UCG | 24 | I18I | GCCCCGCUAUGAGGGC |
| flip_30_7 | | | | | GGCGGCAAGGAGCAC |
| | | | | | (SEQ ID |
| | | | | | NO: 447) |
| TCG_PPIB30bp_guide_U- | PPIB | UCG | 22 | I18I | GGACCCCGCUAUGAGG |
| flip_30_9 | | | | | GCGGCGGCAAGGAGC |
| | | | | | (SEQ ID |
| | | | | | NO: 448) |
| TCG_PPIB_30bp_guide_U- | PPIB | UCG | 20 | I18I | GCGGACCCCGCUAUGA |
| flip_30_11 | | | | | GGGCGGCGGCAAGGA |
| | | | | | (SEQ ID |
| | | | | | NO: 449) |
| TCG_PPIB_30bp_guide_U- | PPIB | UCG | 18 | I181 | GGACGGACCCCGCUAU |
| flip_30_13 | | | | | GAGGGCGGCGGCAAG |
| | | | | | (SEQ ID |
| | | | | | NO: 450) |
| ACG_PPIB_30bp_guide_U- | PPIB | ACG | 24 | R7C | GUGUUGCUUUCGGAGA |
| flip_30_7 | | | | | GGCGCAGCAUCCACA |
| | | | | | (SEQ ID |
| | | | | | NO: 451) |
| ACG_PPIB_30bp_guide_U- | PPIB | ACG | 22 | R7C | GCAUGUUGCUUUCGGA |
| flip_30_9 | | | | | GAGGCGCAGCAUCCA |
| | | | | | (SEQ ID |
| | | | | | NO: 452) |
| ACG_PPIB_30bp_guide_U- | PPIB | ACG | 20 | R7C | GUUCAUGUUGCUUUCG |
| flip_30_11 | | | | | GAGAGGCGCAGCAUC |
| | | | | | (SEQ ID |
| | | | | | NO: 453) |
| ACG_PPIB_30bp_guide_U- | PPIB | ACG | 18 | R7C | GCCUUCAUGUUGCUUU |
| flip_30_13 | | | | | CGGAGAGGCGCAGCA |
| | | | | | (SEQ ID |
| | | | | | NO: 454) |
| GCG_PPIB_30bp_guide_U- | PPIB | GCG | 24 | A19V | GGACCCCUCGAUGAGG |
| flip_30_7 | | | | | GCGGCGGCAAGGAGC |
| | | | | | (SEQ ID |
| | | | | | NO: 455) |
| GCG_PPIB_30bp_guide_U- | PPIB | GCG | 22 | A19V | GCGGACCCCUCGAUGA |
| flip_30_9 | | | | | GGGCGGCGGCAAGGA |
| | | | | | (SEQ ID |
| | | | | | NO: 456) |
| GCG_PPIB_30bp_guide_U- | PPIB | GCG | 20 | A19V | GGACGGACCCCUCGAU |
| flip_30_11 | | | | | GAGGGCGGCGGCAAG |
| | | | | | (SEQ ID |
| | | | | | NO: 457) |
| GCG_PPIB_30bp_guide_U- | PPIB | GCG | 18 | A19V | GAAGACGGACCCCUCG |
| flip_30_13 | | | | | AUGAGGGCGGCGGCA |
| | | | | | (SEQ ID |
| | | | | | NO: 458) |
| CCG_PPIB_30bp_guide_U- | PPIB | CCG | 24 | S21S | GGAAGACUGACCCCGC |
| flip_30_7 | | | | | GAUGAGGGCGGCGGC |
| | | | | | (SEQ ID |
| | | | | | NO: 459) |
| CCG_PPIB_30bp_guide_U- | PPIB | CCG | 22 | S21S | GAAGAAGACUGACCCC |
| flip_30_9 | | | | | GCGAUGAGGGCGGCG |
| | | | | | (SEQ ID |
| | | | | | NO: 460) |
| CCG_PPIB_30bp_guide_U- | PPIB | CCG | 20 | S21S | GGGAAGAAGACUGACC |
| flip_30_11 | | | | | CCGCGAUGAGGGCGG |
| | | | | | (SEQ ID |
| | | | | | NO: 461) |
| CCG_PPIB_30bp_guide_U- | PPIB | CCG | 18 | S21S | GCAGGAAGAAGACUGA |
| flip_30_13 | | | | | CCCCGCGAUGAGGGC |
| | | | | | (SEQ ID |
| | | | | | NO: 462) |
| TCG_SMARCA4_30bp_guide_U- | SMARCA4 | UCG | 24 | S85L | GUCGUCCUACAUGCCC |
| flip_30_7 | | | | | UUCUCAUGCAUGGAC |
| | | | | | (SEQ ID |
| | | | | | NO: 463) |
| TCG_SMARCA4_30bp_guide_U- | SMARCA4 | UCG | 22 | S85L | GGGUCGUCCUACAUGC |
| flip_30_9 | | | | | CCUUCUCAUGCAUGG |
| | | | | | (SEQ ID |
| | | | | | NO: 464) |
| TCG_SMARCA4_30bp_guide_U- | SMARCA4 | UCG | 20 | S85L | GCGGGUCGUCCUACAU |
| flip_30_11 | | | | | GCCCUUCUCAUGCAU |
| | | | | | (SEQ ID |
| | | | | | NO: 465) |
| TCG_SMARCA4_30bp_guide_U- | SMARCA4 | UCG | 18 | S85L | GCGCGGGUCGUCCUAC |
| flip_30_13 | | | | | AUGCCCUUCUCAUGC |
| | | | | | (SEQ ID |
| | | | | | NO: 466) |
| ACG_SMARCA4_30bp_guide_U- | SMARCA4 | ACG | 24 | D86D | GCGGGUCUUCCGACAU |
| flip_30_7 | | | | | GCCCUUCUCAUGCAU |
| | | | | | (SEQ ID |
| | | | | | NO: 467) |
| ACG_SMARCA4_30bp_guide_U- | SMARCA4 | ACG | 22 | D86D | GCGCGGGUCUUCCGAC |
| flip_30_9 | | | | | AUGCCCUUCUCAUGC |
| | | | | | (SEQ ID |
| | | | | | NO: 468) |
| ACG_SMARCA4_30bp_guide_U- | SMARCA4 | ACG | 20 | D86D | GAGCGCGGGUCUUCCG |
| flip_30_11 | | | | | ACAUGCCCUUCUCAU |
| | | | | | (SEQ ID |
| | | | | | NO: 469) |
| ACG_SMARCA4_30bp_guide_U- | SMARCA4 | ACG | 18 | D86D | GGUAGCGCGGGUCUUC |
| flip_30_13 | | | | | CGACAUGCCCUUCUC |
| | | | | | (SEQ ID |
| | | | | | NO: 470) |
| GCG_SMARCA4_30bp_guide_U- | SMARCA4 | GCG | 24 | R89C | GUGUAGCUCGGGUCGU |
| flip_30_7 | | | | | CCGACAUGCCCUUCU |
| | | | | | (SEQ ID |
| | | | | | NO: 471) |
| GCG_SMARCA4_30bp_guide_U- | SMARCA4 | GCG | 22 | R89C | GGUUGUAGCUCGGGUC |
| flip_30_9 | | | | | GUCCGACAUGCCCUU |
| | | | | | (SEQ ID |
| | | | | | NO: 472) |
| GCG_SMARCA4_30bp_guide_U- | SMARCA4 | GCG | 20 | R89C | GUGGUUGUAGCUCGGG |
| flip_30_11 | | | | | UCGUCCGACAUGCCC |
| | | | | | (SEQ ID |
| | | | | | NO: 473) |
| GCG_SMARCA4_30bp_guide_U- | SMARCA4 | GCG | 18 | R89C | GUCUGGUUGUAGCUCG |
| flip_30_13 | | | | | GGUCGUCCGACAUGC |
| | | | | | (SEQ ID |
| | | | | | NO: 474) |
| CCG_SMARCA4_30bp_guide_U- | SMARCA4 | CCG | 24 | P88L | GUAGCGCUGGUCGUCC |
| flip_30_7 | | | | | GACAUGCCCUUCUCA |
| | | | | | (SEQ ID |
| | | | | | NO: 475) |
| CCG_SMARCA4_30bp_guide_U- | SMARCA4 | CCG | 22 | P88L | GUGUAGCGCUGGUCGU |
| flip_30_9 | | | | | CCGACAUGCCCUUCU |
| | | | | | (SEQ ID |
| | | | | | NO: 476) |
| CCG_SMARCA4_30bp_guide_U- | SMARCA4 | CCG | 20 | P88L | GGUUGUAGCGCUGGUC |
| flip_30_11 | | | | | GUCCGACAUGCCCUU |
| | | | | | (SEQ ID |
| | | | | | NO: 477) |
| CCG_SMARCA4_30bp_guide_U- | SMARCA4 | CCG | 18 | P88L | GUGGUUGUAGCGCUGG |
| flip_30_13 | | | | | UCGUCCGACAUGCCC |
| | | | | | (SEQ ID |
| | | | | | NO: 478) |
| S33F_CTNNB1_30bp_C- | CTNNB1 | UCU | 24 | S33F | GAUUCCACAGUCCAGG |
| flip_guide_30_7 | | | | | UAAGACUGUUGCUGC |
| | | | | | (SEQ ID |
| | | | | | NO: 479) |
| S33F_CTNNB1_30bp_C- | CTNNB1 | UCU | 22 | S33F | GGGAUUCCACAGUCCA |
| flip_guide_30_9 | | | | | GGUAAGACUGUUGCU |
| | | | | | (SEQ ID |
| | | | | | NO: 480) |
| S33F_CTNNB1_30bp_C- | CTNNB1 | UCU | 20 | S33F | GAUGGAUUCCACAGUC |
| flip_guide_30_11 | | | | | CAGGUAAGACUGUUG |
| | | | | | (SEQ ID |
| | | | | | NO: 481) |
| S33F_CTNNB1_30bp_C- | CTNNB1 | UCU | 18 | S33F | GGAAUGGAUUCCACAG |
| flip_guide_30_13 | | | | | UCCAGGUAAGACUGU |
| | | | | | (SEQ ID |
| | | | | | NO: 482) |
| H36Y_CTNNB1_30bp_C- | CTNNB1 | CCA | 24 | H36Y | GCAGAAUCGAUUCCAG |
| flip_guide_30_7 | | | | | AGUCCAGGUAAGACU |
| | | | | | (SEQ ID |
| | | | | | NO: 483) |
| H36Y_CTNNB1_30bp_C- | CTNNB1 | CCA | 22 | H36Y | GACCAGAAUCGAUUCC |
| flip_guide_30_9 | | | | | AGAGUCCAGGUAAGA |
| | | | | | (SEQ ID |
| | | | | | NO: 484) |
| H36Y_CTNNB1_30bp_C- | CTNNB1 | CCA | 20 | H36Y | GGCACCAGAAUCGAUU |
| flip_guide_30_11 | | | | | CCAGAGUCCAGGUAA |
| | | | | | (SEQ ID |
| | | | | | NO: 485) |
| H36Y_CTNNB1_30bp_C | CTNNB1 | CCA | 18 | H36Y | GUGGCACCAGAAUCGA |
| flip_guide_30_13 | | | | | UUCCAGAGUCCAGGU |
| | | | | | (SEQ ID |
| | | | | | NO: 486) |
| S37F_CTNNB1_30bp_C- | CTNNB1 | UCU | 24 | S37F | GGCACCACAAUGGAUU |
| flip_guide_30_7 | | | | | CCAGAGUCCAGGUAA |
| | | | | | (SEQ ID |
| | | | | | NO: 487) |
| S37F_CTNNB1_30bp_C- | CTNNB1 | UCU | 22 | S37F | GUGGCACCACAAUGGA |
| flip_guide_30_9 | | | | | UUCCAGAGUCCAGGU |
| | | | | | (SEQ ID |
| | | | | | NO: 488) |
| S37F_CTNNB1_30bp_C- | CTNNB1 | UCU | 20 | S37F | GAGUGGCACCACAAUG |
| flip_guide_30_11 | | | | | GAUUCCAGAGUCCAG |
| | | | | | (SEQ ID |
| | | | | | NO: 489) |
| S37F_CTNNB1_30bp_C- | CTNNB1 | UCU | 18 | S37F | GGUAGUGGCACCACAA |
| flip_guide_30_13 | | | | | UGGAUUCCAGAGUCC |
| | | | | | (SEQ ID |
| | | | | | NO: 490) |
| T41I_CTNNB1_30bp_C- | CTNNB1 | ACC | 24 | T41I | GGCUGUGCUAGUGGCA |
| flip_guide_30_7 | | | | | CCAGAAUGGAUUCCA |
| | | | | | (SEQ ID |
| | | | | | NO: 491) |
| T41I_CTNNB1_30bp_C- | CTNNB1 | ACC | 22 | T41I | GGAGCUGUGCUAGUGG |
| flip_guide_30_9 | | | | | CACCAGAAUGGAUUC |
| | | | | | (SEQ ID |
| | | | | | NO: 492) |
| T41I_CTNNB1_30bp_C- | CTNNB1 | ACC | 20 | T41I | GAGGAGCUGUGCUAGU |
| flip_guide_30_11 | | | | | GGCACCAGAAUGGAU |
| | | | | | (SEQ ID |
| | | | | | NO: 493) |
| T41I_CTNNB1_30bp_C- | CTNNB1 | ACC | 18 | T41I | GGAAGGAGCUGUGCUA |
| flip_guide_30_13 | | | | | GUGGCACCAGAAUGG |
| | | | | | (SEQ ID |
| | | | | | NO: 494) |
| P44L_CTNNB1_30bp_C- | CTNNB1 | CCU | 24 | P44L | GAGAGAACGAGCUGUG |
| flip_guide_30_7 | | | | | GUAGUGGCACCAGAA |
| | | | | | (SEQ ID |
| | | | | | NO: 495) |
| P44L_CTNNB1_30bp_C- | CTNNB1 | CCU | 22 | P44L | GUCAGAGAACGAGCUG |
| flip_guide_30_9 | | | | | UGGUAGUGGCACCAG |
| | | | | | (SEQ ID |
| | | | | | NO: 496) |
| P44L_CTNNB1_30bp_C- | CTNNB1 | CCU | 20 | P44L | GACUCAGAGAACGAGC |
| flip_guide_30_11 | | | | | UGUGGUAGUGGCACC |
| | | | | | (SEQ ID |
| | | | | | NO: 497) |
| P44L_CTNNB1_30bp_C- | CTNNB1 | CCU | 18 | P44L | GCCACUCAGAGAACGA |
| flip_guide_30_13 | | | | | GCUGUGGUAGUGGCA |
| | | | | | (SEQ ID |
| | | | | | NO: 498) |
| P44S_CTNNB1_30bp_C- | CTNNB1 | UCU | 24 | P44S | GGAGAAGCAGCUGUGG |
| flip_guide_30_7 | | | | | UAGUGGCACCAGAAU |
| | | | | | (SEQ ID |
| | | | | | NO: 499) |
| P44S_CTNNB1_30bp_C- | CTNNB1 | UCU | 22 | P44S | GCAGAGAAGCAGCUGU |
| flip_guide_30_9 | | | | | GGUAGUGGCACCAGA |
| | | | | | (SEQ ID |
| | | | | | NO: 500) |
| P44S_CTNNB1_30bp_C- | CTNNB1 | UCU | 20 | P44S | GCUCAGAGAAGCAGCU |
| flip_guide_30_11 | | | | | GUGGUAGUGGCACCA |
| | | | | | (SEQ ID |
| | | | | | NO: 501) |
| P44S_CTNNB1_30bp_C- | CTNNB1 | UCU | 18 | P44S | GCACUCAGAGAAGCAG |
| flip_guide_30_13 | | | | | CUGUGGUAGUGGCAC |
| | | | | | (SEQ ID |
| | | | | | NO: 502) |
| S45F_CTNNB1_30bp_C- | CTNNB1 | UCU | 24 | S45F | GCUCAGACAAGGAGCU |
| flip_guide_30_7 | | | | | GUGGUAGUGGCACCA |
| | | | | | (SEQ ID |
| | | | | | NO: 503) |
| S45F_CTNNB1_30bp_C- | CTNNB1 | UCU | 22 | S45F | GCACUCAGACAAGGAG |
| flip_guide_30_9 | | | | | CUGUGGUAGUGGCAC |
| | | | | | (SEQ ID |
| | | | | | NO: 504) |
| S45F_CTNNB1_30bp_C- | CTNNB1 | UCU | 20 | S45F | GACCACUCAGACAAGG |
| flip_guide_30_11 | | | | | AGCUGUGGUAGUGGC |
| | | | | | (SEQ ID |
| | | | | | NO: 505) |
| S45F_CTNNB1_30bp_C- | CTNNB1 | UCU | 18 | S45F | GUUACCACUCAGACAA |
| flip_guide_30_13 | | | | | GGAGCUGUGGUAGUG |
| | | | | | (SEQ ID |
| | | | | | NO: 506) |
| TCG_KRAS_30bp_C- | KRAS | UCG | 24 | L56L | GUGUGUCCAGAAUAUC |
| flip_guide_30_7 | | | | | CAAGAGACAGGUUUC |
| | | | | | (SEQ ID |
| | | | | | NO: 507) |
| TCG_KRAS_30bp_C- | KRAS | UCG | 22 | L56L | GGCUGUGUCCAGAAUA |
| flip_guide_30_9 | | | | | UCCAAGAGACAGGUU |
| | | | | | (SEQ ID |
| | | | | | NO: 508) |
| TCG_KRAS_30bp_C- | KRAS | UCG | 20 | L56L | GCUGCUGUGUCCAGAA |
| flip_guide_30_11 | | | | | UAUCCAAGAGACAGG |
| | | | | | (SEQ ID |
| | | | | | NO: 509) |
| TCG_KRAS_30bp_C- | KRAS | UCG | 18 | L56L | GACCUGCUGUGUCCAG |
| flip_guide_30_13 | | | | | AAUAUCCAAGAGACA |
| | | | | | (SEQ ID |
| | | | | | NO: 510) |
| ACG_KRAS_30bp_C- | KRAS | ACG | 24 | D30D | GAUAUUCCUCCACAAA |
| flip_guide_30_7 | | | | | AUGAUUCUGAAUUAG |
| | | | | | (SEQ ID |
| | | | | | NO: 511) |
| ACG_KRAS_30bp_C- | KRAS | ACG | 22 | D30D | GUCAUAUUCCUCCACA |
| flip_guide_30_9 | | | | | AAAUGAUUCUGAAUU |
| | | | | | (SEQ ID |
| | | | | | NO: 512) |
| ACG_KRAS_30bp_C- | KRAS | ACG | 20 | D30D | GGAUCAUAUUCCUCCA |
| flip_guide_30_11 | | | | | CAAAAUGAUUCUGAA |
| | | | | | (SEQ ID |
| | | | | | NO: 513) |
| ACG_KRAS_30bp_C- | KRAS | ACG | 18 | D30D | GUGGAUCAUAUUCCUC |
| flip_guide_30_13 | | | | | CACAAAAUGAUUCUG |
| | | | | | (SEQ ID |
| | | | | | NO: 514) |
| GCG_KRAS_30bp_C- | KRAS | GCG | 24 | G13G | GGCCUACCCCACCAGC |
| flip_guide_30_7 | | | | | UCCAACUACCACAAG |
| | | | | | (SEQ ID |
| | | | | | NO: 515) |
| GCG_KRAS_30bp_C- | KRAS | GCG | 22 | G13G | GUUGCCUACCCCACCA |
| flip_guide_30_9 | | | | | GCUCCAACUACCACA |
| | | | | | (SEQ ID |
| | | | | | NO: 516) |
| GCG_KRAS_30bp_C- | KRAS | GCG | 20 | G13G | GUCUUGCCUACCCCAC |
| flip_guide_30_13 | | | | | CAGCUCCAACUACCA |
| | | | | | (SEQ ID |
| | | | | | NO: 517) |
| GCG_KRAS_30bp_C- | KRAS | GCG | 18 | G13G | GACUCUUGCCUACCCC |
| flip_guide_30_13 | | | | | ACCAGCUCCAACUAC |
| | | | | | (SEQ ID |
| | | | | | NO: 518) |
| CCT_KRAS_30bp_C- | KRAS | CCU | 24 | A18A | GCGUCAACGCACUCUU |
| flip_guide_30_7 | | | | | GCCUACGCCACCAGC |
| | | | | | (SEQ ID |
| | | | | | NO: 519) |
| CCT_KRAS_30bp_C- | KRAS | CCU | 22 | A18A | GAUCGUCAACGCACUC |
| flip_guide_30_9 | | | | | UUGCCUACGCCACCA |
| | | | | | (SEQ ID |
| | | | | | NO: 520) |
| CCT_KRAS_30bp_C- | KRAS | CCU | 20 | A18A | GGUAUCGUCAACGCAC |
| flip_guide_30_11 | | | | | UCUUGCCUACGCCAC |
| | | | | | (SEQ ID |
| | | | | | NO: 521) |
| CCT_KRAS_30bp_C- | KRAS | CCU | 18 | A18A | GCUGUAUCGUCAACGC |
| flip_guide_30_13 | | | | | ACUCUUGCCUACGCC |
| | | | | | (SEQ ID |
| | | | | | NO: 522) |
| TCG_PPIB__30bp_C- | PPIB | UCG | 24 | I181 | GCCCCGCCAUGAGGGC |
| flip_guide_30_7 | | | | | GGCGGCAAGGAGCAC |
| | | | | | (SEQ ID |
| | | | | | NO: 523) |
| TCG_PPIB_30bp_C- | PPIB | UCG | 22 | I181 | GGACCCCGCCAUGAGG |
| flip_guide_30_9 | | | | | GCGGCGGCAAGGAGC |
| | | | | | (SEQ ID |
| | | | | | NO: 524) |
| TCG_PPIB_30bp_C- | PPIB | UCG | 20 | I181 | GCGGACCCCGCCAUGA |
| flip_guide_30_11 | | | | | GGGCGGCGGCAAGGA |
| | | | | | (SEQ ID |
| | | | | | NO: 525) |
| TCG_PPIB_30bp_C- | PPIB | UCG | 18 | I181 | GGACGGACCCCGCCAU |
| flip_guide_30_13 | | | | | GAGGGCGGCGGCAAG |
| | | | | | (SEQ ID |
| | | | | | NO: 526) |
| ACG_PPIB_30bp_C- | PPIB | ACG | 24 | R7C | GUGUUGCCUUCGGAGA |
| flip_guide_30_7 | | | | | GGCGCAGCAUCCACA |
| | | | | | (SEQ ID |
| | | | | | NO: 527) |
| ACG_PPIB_30bp_C- | PPIB | ACG | 22 | R7C | GCAUGUUGCCUUCGGA |
| flip_guide_30_9 | | | | | GAGGCGCAGCAUCCA |
| | | | | | (SEQ ID |
| | | | | | NO: 528) |
| ACG_PPIB_30bp_C- | PPIB | ACG | 20 | R7C | GUUCAUGUUGCCUUCG |
| flip_guide_30_11 | | | | | GAGAGGCGCAGCAUC |
| | | | | | (SEQ ID |
| | | | | | NO: 529) |
| ACG_PPIB_30bp_C- | PPIB | ACG | 18 | R7C | GCCUUCAUGUUGCCUU |
| flip_guide_30_13 | | | | | CGGAGAGGCGCAGCA |
| | | | | | (SEQ ID |
| | | | | | NO: 530) |
| GCG_PPIB_30bp_C- | PPIB | GCG | 24 | A19V | GGACCCCCCGAUGAGG |
| flip_guide_30_7 | | | | | GCGGCGGCAAGGAGC |
| | | | | | (SEQ ID |
| | | | | | NO: 531) |
| GCG_PPIB_30bp_C- | PPIB | GCG | 22 | A19V | GCGGACCCCCCGAUGA |
| flip_guide_30_9 | | | | | GGGCGGCGGCAAGGA |
| | | | | | (SEQ ID |
| | | | | | NO: 532) |
| GCG_PPIB_30bp_C- | PPIB | GCG | 20 | A19V | GGACGGACCCCCCGAU |
| flip_guide_30_11 | | | | | GAGGGCGGCGGCAAG |
| | | | | | (SEQ ID |
| | | | | | NO: 533) |
| GCG_PPIB_30bp_C- | PPIB | GCG | 18 | A19V | GAAGACGGACCCCCCG |
| flip_guide_30_13 | | | | | AUGAGGGCGGCGGCA |
| | | | | | (SEQ ID |
| | | | | | NO: 534) |
| CCG_PPIB_30bp_C- | PPIB | CCG | 24 | S21S | GGAAGACCGACCCCGC |
| flip_guide_30_7 | | | | | GAUGAGGGCGGCGGC |
| | | | | | (SEQ ID |
| | | | | | NO: 535) |
| CCG_PPIB_30bp_C- | PPIB | CCG | 22 | S21S | GAAGAAGACCGACCCC |
| flip_guide_30_9 | | | | | GCGAUGAGGGCGGCG |
| | | | | | (SEQ ID |
| | | | | | NO: 536) |
| CCG_PPIB_30bp_C- | PPIB | CCG | 20 | S21S | GGGAAGAAGACCGACC |
| flip_guide_30_11 | | | | | CCGCGAUGAGGGCGG |
| | | | | | (SEQ ID |
| | | | | | NO: 537) |
| CCG_PPIB_30bp_C- | PPIB | CCG | 18 | S21S | GCAGGAAGAAGACCGA |
| flip_guide_30_13 | | | | | CCCCGCGAUGAGGGC |
| | | | | | (SEQ ID |
| | | | | | NO: 538) |
| TCG_SMARCA4_30bp_C- | SMARCA4 | UCG | 24 | S85L | GUCGUCCCACAUGCCC |
| flip_guide_30_7 | | | | | UUCUCAUGCAUGGAC |
| | | | | | (SEQ ID |
| | | | | | NO: 539) |
| TCG_SMARCA4_30bp_C- | SMARCA4 | UCG | 22 | S85L | GGGUCGUCCCACAUGC |
| flip_guide_30_9 | | | | | CCUUCUCAUGCAUGG |
| | | | | | (SEQ ID |
| | | | | | NO: 540) |
| TCG_SMARCA4_30bp_C- | SMARCA4 | UCG | 20 | S85L | GCGGGUCGUCCCACAU |
| flip_guide_30_11 | | | | | GCCCUUCUCAUGCAU |
| | | | | | (SEQ ID |
| | | | | | NO: 541) |
| TCG_SMARCA4_30bp_C- | SMARCA4 | UCG | 18 | S85L | GCGCGGGUCGUCCCAC |
| flip_guide_30_13 | | | | | AUGCCCUUCUCAUGC |
| | | | | | (SEQ ID |
| | | | | | NO: 542) |
| ACG_SMARCA4_30bp_C- | SMARCA4 | ACG | 24 | D86D | GCGGGUCCUCCGACAU |
| flip_guide_30_7 | | | | | GCCCUUCUCAUGCAU |
| | | | | | (SEQ ID |
| | | | | | NO: 543) |
| ACG_SMARCA4_30bp_C- | SMARCA4 | ACG | 22 | D86D | GCGCGGGUCCUCCGAC |
| flip_guide_30_9 | | | | | AUGCCCUUCUCAUGC |
| | | | | | (SEQ ID |
| | | | | | NO: 544) |
| ACG_SMARCA4_30bp_C- | SMARCA4 | ACG | 20 | D86D | GAGCGCGGGUCCUCCG |
| flip_guide_30_11 | | | | | ACAUGCCCUUCUCAU |
| | | | | | (SEQ ID |
| | | | | | NO: 545) |
| ACG_SMARCA4_30bp_C- | SMARCA4 | ACG | 18 | D86D | GGUAGCGCGGGUCCUC |
| flip_guide_30_13 | | | | | CGACAUGCCCUUCUC |
| | | | | | (SEQ ID |
| | | | | | NO: 546) |
| GCG_SMARCA4_30bp_C- | SMARCA4 | GCG | 24 | R89C | GUGUAGCCCGGGUCGU |
| flip_guide_30_7 | | | | | CCGACAUGCCCUUCU |
| | | | | | (SEQ ID |
| | | | | | NO: 547) |
| GCG_SMARCA4_30bp_C- | SMARCA4 | GCG | 22 | R89C | GGUUGUAGCCCGGGUC |
| flip_guide_30_9 | | | | | GUCCGACAUGCCCUU |
| | | | | | (SEQ ID |
| | | | | | NO: 548) |
| GCG_SMARCA4_30bp_C- | SMARCA4 | GCG | 20 | R89C | GUGGUUGUAGCCCGGG |
| flip_guide_30_11 | | | | | UCGUCCGACAUGCCC |
| | | | | | (SEQ ID |
| | | | | | NO: 549) |
| GCG_SMARCA4_30bp_C- | SMARCA4 | GCG | 18 | R89C | GUCUGGUUGUAGCCCG |
| flip_guide_30_13 | | | | | GGUCGUCCGACAUGC |
| | | | | | (SEQ ID |
| | | | | | NO: 550) |
| CCG_SMARCA4_30bp_C- | SMARCA4 | CCG | 24 | P88L | GUAGCGCCGGUCGUCC |
| flip_guide_30_7 | | | | | GACAUGCCCUUCUCA |
| | | | | | (SEQ ID |
| | | | | | NO: 551) |
| CCG_SMARCA4_30bp_C- | SMARCA4 | CCG | 22 | P88L | GUGUAGCGCCGGUCGU |
| flip_guide_30_9 | | | | | CCGACAUGCCCUUCU |
| | | | | | (SEQ ID |
| | | | | | NO: 552) |
| CCG_SMARCA4_30bp_C- | SMARCA4 | CCG | 20 | P88L | GGUUGUAGCGCCGGUC |
| flip_guide_30_11 | | | | | GUCCGACAUGCCCUU |
| | | | | | (SEQ ID |
| | | | | | NO: 553) |
| CCG_SMARCA4_30bp_C- | SMARCA4 | CCG | 18 | P88L | GUGGUUGUAGCGCCGG |
| flip_guide_30_13 | | | | | UCGUCCGACAUGCCC |
| | | | | | (SEQ ID |
| | | | | | NO: 554) |
| NRAS_30bp_C- | NRAS | UCC | 28 | I21I | GUGCAUUGUCAGUGCG |
| flip_guide_30_3 | | | | | CUUUUCCCAACACCA |
| | | | | | (SEQ ID |
| | | | | | NO: 555) |
| NRAS_30bp_C- | NRAS | UCC | 26 | I21I | GGCUGCAUUGUCAGUG |
| flip_guide_30_5 | | | | | CGCUUUUCCCAACAC |
| | | | | | (SEQ ID |
| | | | | | NO: 556) |
| NRAS_30bp_C- | NRAS | UCC | 24 | I21I | GUAGCUGCAUUGUCAG |
| flip_guide_30_7 | | | | | UGCGCUUUUCCCAAC |
| | | | | | (SEQ ID |
| | | | | | NO: 557) |
| NRAS_30bp_C- | NRAS | UCC | 22 | I21I | GAUUAGCUGCAUUGUC |
| flip_guide_30_9 | | | | | AGUGCGCUUUUCCCA |
| | | | | | (SEQ ID |
| | | | | | NO: 558) |
| NRAS_30bp_C- | NRAS | UCC | 20 | I21I | GGGAUUAGCUGCAUUG |
| flip_guide_30_11 | | | | | UCAGUGCGCUUUUCC |
| | | | | | (SEQ ID |
| | | | | | NO: 559) |
| NKFB1_30bp_C- | NKFB1 | ACC | 28 | P33S | GUGCUUGAAAUACUUC |
| flip_guide_30_3 | | | | | UGGAUUAAAUAUUGU |
| | | | | | (SEQ ID |
| | | | | | NO: 560) |
| NKFB1_30bp_C- | NKFB1 | ACC | 26 | P33S | GUGUGCUUGAAAUACU |
| flip_guide_30_5 | | | | | UCUGGAUUAAAUAUU |
| | | | | | (SEQ ID |
| | | | | | NO: 561) |
| NKFB1_30bp_C- | NKFB1 | ACC | 24 | P33S | GUCUGUGCUUGAAAUA |
| flip_guide_30_7 | | | | | CUUCUGGAUUAAAUA |
| | | | | | (SEQ ID |
| | | | | | NO: 562) |
| NKFB1_30bp_C- | NKFB1 | ACC | 22 | P33S | GCAUCUGUGCUUGAAA |
| flip_guide_30_9 | | | | | UACUUCUGGAUUAAA |
| | | | | | (SEQ ID |
| | | | | | NO: 563) |
| NKFB1_30bp_C- | NKFB1 | ACC | 20 | P33S | GGCCAUCUGUGCUUGA |
| flip_guide_30_11 | | | | | AAUACUUCUGGAUUA |
| | | | | | (SEQ ID |
| | | | | | NO: 564) |
| EZH2_30bp_C- | EZH2 | UCA | 28 | F32F | GCUCAACCUCUUGAGC |
| flip_guide_30_3 | | | | | UGUCUCAGUCGCAUG |
| | | | | | (SEQ ID |
| | | | | | NO: 565) |
| EZH2_30bp_C- | EZH2 | UCA | 26 | F32F | GGUCUCAACCUCUUGA |
| flip_guide_30_5 | | | | | GCUGUCUCAGUCGCA |
| | | | | | (SEQ ID |
| | | | | | NO: 566) |
| EZH2_30bp_C- | EZH2 | UCA | 24 | F32F | GUCGUCUCAACCUCUU |
| flip_guide_30_7 | | | | | GAGCUGUCUCAGUCG |
| | | | | | (SEQ ID |
| | | | | | NO: 567) |
| EZH2_30bp_C- | EZH2 | UCA | 22 | F32F | GGCUCGUCUCAACCUC |
| flip_guide_30_9 | | | | | UUGAGCUGUCUCAGU |
| | | | | | (SEQ ID |
| | | | | | NO: 568) |
| EZH2_30bp_C- | EZH2 | UCA | 20 | F32F | GCAGCUCGUCUCAACC |
| flip_guide_30_11 | | | | | UCUUGAGCUGUCUCA |
| | | | | | (SEQ ID |
| | | | | | NO: 569) |
| NF2_30bp_C- | NF2 | ACG | 28 | T21M | GACCUCUUGGGUUGCU |
| flip_guide_30_3 | | | | | UCCUCUUGAGAGAGC |
| | | | | | (SEQ ID |
| | | | | | NO: 570) |
| NF2_30bp_C- | NF2 | ACG | 26 | T21M | GGAACCUCUUGGGUUG |
| flip_guide_30_5 | | | | | CUUCCUCUUGAGAGA |
| | | | | | (SEQ ID |
| | | | | | NO: 571) |
| NF2_30bp_C- | NF2 | ACG | 24 | T21M | GGUGAACCUCUUGGGU |
| flip_guide_30_7 | | | | | UGCUUCCUCUUGAGA |
| | | | | | (SEQ ID |
| | | | | | NO: 572) |
| NF2_30bp_C- | NF2 | ACG | 22 | T21M | GCGGUGAACCUCUUGG |
| flip_guide_30_9 | | | | | GUUGCUUCCUCUUGA |
| | | | | | (SEQ ID |
| | | | | | NO: 573) |
| NF2_30bp_C- | NF2 | ACG | 20 | T21M | GCACGGUGAACCUCUU |
| flip_guide_30_11 | | | | | GGGUUGCUUCCUCUU |
| | | | | | (SEQ ID |
| | | | | | NO: 574) |
| RAF1_30bp_C- | RAF1 | UCC | 28 | P30S | GAGCAGAGAUGCAGCU |
| flip_guide_30_3 | | | | | GGAGCCAUCAAACAC |
| | | | | | (SEQ ID |
| | | | | | NO: 575) |
| RAF1_30bp_C- | RAF1 | UCC | 26 | P30S | GGUAGCAGAGAUGCAG |
| flip_guide_30_5 | | | | | CUGGAGCCAUCAAAC |
| | | | | | (SEQ ID |
| | | | | | NO: 576) |
| RAF1_30bp_C- | RAF1 | UCC | 24 | P30S | GUUGUAGCAGAGAUGC |
| flip_guide_30_7 | | | | | AGCUGGAGCCAUCAA |
| | | | | | (SEQ ID |
| | | | | | NO: 577) |
| RAF1_30bpC- | RAF1 | UCC | 22 | P30S | GUAUUGUAGCAGAGAU |
| flip_guide_30_9 | | | | | GCAGCUGGAGCCAUC |
| | | | | | (SEQ ID |
| | | | | | NO: 578) |
| RAF1_30bp_C- | RAF1 | UCC | 20 | P30S | GACUAUUGUAGCAGAG |
| flip_guide_30_11 | | | | | AUGCAGCUGGAGCCA |
| | | | | | (SEQ ID |
| | | | | | NO: 579) |
| NRAS_30bp_T- | NRAS | UCC | 28 | I21I | GUGUAUUGUCAGUGCG |
| flip_guide_30_3 | | | | | CUUUUCCCAACACCA |
| | | | | | (SEQ ID |
| | | | | | NO: 580) |
| NRAS_30bp_T- | NRAS | UCC | 26 | I21I | GGCUGUAUUGUCAGUG |
| flip_guide_30_5 | | | | | CGCUUUUCCCAACAC |
| | | | | | (SEQ ID |
| | | | | | NO: 581) |
| NRAS_30bp_T- | NRAS | UCC | 24 | I21I | GUAGCUGUAUUGUCAG |
| flip_guide_30_7 | | | | | UGCGCUUUUCCCAAC |
| | | | | | (SEQ ID |
| | | | | | NO: 582) |
| NRAS_30bp_T- | NRAS | UCC | 22 | I21I | GAUUAGCUGUAUUGUC |
| flip_guide_30_9 | | | | | AGUGCGCUUUUCCCA |
| | | | | | (SEQ ID |
| | | | | | NO: 583) |
| NRAS_30bp_T- | NRAS | UCC | 20 | I21I | GGGAUUAGCUGUAUUG |
| flip_guide_30_11 | | | | | UCAGUGCGCUUUUCC |
| | | | | | (SEQ ID |
| | | | | | NO: 584) |
| NKFB1_30bp_T- | NKFB1 | ACC | 28 | P33S | GUGUUUGAAAUACUUC |
| flip_guide_30_3 | | | | | UGGAUUAAAUAUUGU |
| | | | | | (SEQ ID |
| | | | | | NO: 585) |
| NKFB1_30bp_T- | NKFB1 | ACC | 26 | P33S | GUGUGUUUGAAAUACU |
| flip_guide_30_5 | | | | | UCUGGAUUAAAUAUU |
| | | | | | (SEQ ID |
| | | | | | NO: 586) |
| NKFB1_30bp_T- | NKFB1 | ACC | 24 | P33S | GUCUGUGUUUGAAAUA |
| flip_guide_30_7 | | | | | CUUCUGGAUUAAAUA |
| | | | | | (SEQ ID |
| | | | | | NO: 587) |
| NKFB1_30bp_T- | NKFB1 | ACC | 22 | P33S | GCAUCUGUGUUUGAAA |
| flip_guide_30_9 | | | | | UACUUCUGGAUUAAA |
| | | | | | (SEQ ID |
| | | | | | NO: 588) |
| NKFB1_30bp_T- | NKFB1 | ACC | 20 | P33S | GGCCAUCUGUGUUUGA |
| flip_guide_30_11 | | | | | AAUACUUCUGGAUUA |
| | | | | | (SEQ ID |
| | | | | | NO: 589) |
| EZH2_30bp_T- | EZH2 | UCA | 28 | F32F | GCUUAACCUCUUGAGC |
| flip_guide_30_3 | | | | | UGUCUCAGUCGCAUG |
| | | | | | (SEQ ID |
| | | | | | NO: 590) |
| EZH2_30bp_T- | EZH2 | UCA | 26 | F32F | GGUCUUAACCUCUUGA |
| flip_guide_30_5 | | | | | GCUGUCUCAGUCGCA |
| | | | | | (SEQ ID |
| | | | | | NO: 591) |
| EZH2_30bp_T- | EZH2 | UCA | 24 | F32F | GUCGUCUUAACCUCUU |
| flip_guide_30_7 | | | | | GAGCUGUCUCAGUCG |
| | | | | | (SEQ ID |
| | | | | | NO: 592) |
| EZH2_30bp_T- | EZH2 | UCA | 22 | F32F | GGCUCGUCUUAACCUC |
| flip_guide_30_9 | | | | | UUGAGCUGUCUCAGU |
| | | | | | (SEQ ID |
| | | | | | NO: 593) |
| EZH2_30bpT- | EZH2 | UCA | 20 | F32F | GCAGCUCGUCUUAACC |
| flip_guide_30_11 | | | | | UCUUGAGCUGUCUCA |
| | | | | | (SEQ ID |
| | | | | | NO: 594) |
| NF2_30bp_T- | NF2 | ACG | 28 | T21M | GACUUCUUGGGUUGCU |
| flip_guide_30_3 | | | | | UCCUCUUGAGAGAGC |
| | | | | | (SEQ ID |
| | | | | | NO: 595) |
| NF2_30bp_T- | NF2 | ACG | 26 | T21M | GGAACUUCUUGGGUUG |
| flip_guide_30_5 | | | | | CUUCCUCUUGAGAGA |
| | | | | | (SEQ ID |
| | | | | | NO: 596) |
| NF2_30bp_T- | NF2 | ACG | 24 | T21M | GGUGAACUUCUUGGGU |
| flip_guide_30_7 | | | | | UGCUUCCUCUUGAGA |
| | | | | | (SEQ ID |
| | | | | | NO: 597) |
| NF2_30bp_T- | NF2 | ACG | 22 | T21M | GCGGUGAACUUCUUGG |
| flip_guide_30_9 | | | | | GUUGCUUCCUCUUGA |
| | | | | | (SEQ ID |
| | | | | | NO: 598) |
| NF2_30bp_T- | NF2 | ACG | 20 | T21M | GCACGGUGAACUUCUU |
| flip_guide_30_11 | | | | | GGGUUGCUUCCUCUU |
| | | | | | (SEQ ID |
| | | | | | NO: 599) |
| RAF1_30bp_T- | RAF1 | UCC | 28 | P30S | GAGUAGAGAUGCAGCU |
| flip_guide_30_3 | | | | | GGAGCCAUCAAACAC |
| | | | | | (SEQ ID |
| | | | | | NO: 600) |
| RAF1_30bp_T- | RAF1 | UCC | 26 | P30S | GGUAGUAGAGAUGCAG |
| flip_guide_30_5 | | | | | CUGGAGCCAUCAAAC |
| | | | | | (SEQ ID |
| | | | | | NO: 601) |
| RAF1_30bp_T- | RAF1 | UCC | 24 | P30S | GUUGUAGUAGAGAUGC |
| flip_guide_30_7 | | | | | AGCUGGAGCCAUCAA |
| | | | | | (SEQ ID |
| | | | | | NO: 602) |
| RAF1_30bp_T- | RAF1 | UCC | 22 | P30S | GUAUUGUAGUAGAGAU |
| flip_guide_30_9 | | | | | GCAGCUGGAGCCAUC |
| | | | | | (SEQ ID |
| | | | | | NO: 603) |
| RAF1_30bp_T- | RAF1 | UCC | 20 | P30S | GACUAUUGUAGUAGAG |
| flip_guide_30_11 | | | | | AUGCAGCUGGAGCCA |
| | | | | | (SEQ ID |
| | | | | | NO: 604) |

TABLE 23
Guide sequences used for synthetic target editing

| | Targeted | | Base flip/ | Codon | |
|---|---|---|---|---|---|
| Name | gene | Motif | position | change | Spacer sequence |
| NM_000016.5_C- | ACADM | ACA | C/7 | H67Y | GUAUCAUCUUCUGCAGCC |
| flip_guide | | | | | ACUGGGAUGAUUU |
| | | | | | (SEQ ID NO: 605) |
| NM_000018.3_C- | ACADVL | GCG | C/9 | A283V | GUCUCCACCCCAAAAGCU |
| flip_guide | | | | | GUGAUCUUCUCCU |
| | | | | | (SEQ ID NO: 606) |
| NM_000071.2_C- | CBS | GCG | C/9 | R109C | GGAACUCACCCUUGGCCA |
| flip_guide | | | | | AGAGCUCACACUU |
| | | | | | (SEQ ID NO: 607) |
| NM_000138.4_C- | FBN1 | GCG | C/5 | R1408C | GGAGCCCUCAUCAAGGUC |
| flip_guide | | | | | UGUACAAGUGAAG |
| | | | | | (SEQ ID NO: 608) |
| NM_000141.4_C- | FGFR2 | CCC | C/7 | P267S | GCUGUGGCGGCAUUUGCC |
| flip_guide | | | | | GGCAGUCCGGCUU |
| | | | | | (SEQ ID NO: 609) |
| NM_000152.4_C- | GAA | CCC | C/7 | P552L | GGCCUGGCGGGUCCCCCC |
| flip_guide | | | | | AACCACCCCAGGC |
| | | | | | (SEQ ID NO: 610) |
| NM_000341.3_C- | SLC3A1 | ACG | C/7 | T467M | GAGAAGCCUGUUCAUCAC |
| flip_guide | | | | | GUUGACAUACUGA |
| | | | | | (SEQ ID NO: 611) |
| NM_000375.2_C- | UROS | ACG | C/9 | R73C | GCUCCAAACCUAACUCUG |
| flip_guide | | | | | CUGCUUCCACUGC |
| | | | | | (SEQ ID NO: 612) |
| NM_000431.3_C- | MVK | ACA | C/9 | T268I | GUGGCAUCUCUUGAGGUC |
| flip_guide | | | | | AGGAGGGGGGCCA |
| | | | | | (SEQ ID NO: 613) |
| NM_000551.3_C- | VHL | CCG | C/7 | P158L | GUCUUUCCGAGUAUACAC |
| flip_guide | | | | | UGGCAGUGUGAUA |
| | | | | | (SEQ ID NO: 614) |
| NM_001256850.1_C- | TTN | ACG | C/9 | R30071C | GCUUUCCACCUGGGCCAG |
| flip_guide | | | | | GGGAAUCAAGCAC |
| | | | | | (SEQ ID NO: 615) |
| NM_002397.4_C- | MEF2C | ACG | C/9 | T1M | GUUCUCCCCCUAGUCCCC |
| flip_guide | | | | | GUUUUUCUUCUCU |
| | | | | | (SEQ ID NO: 616) |
| NM_002474.2_C- | MYH11 | CCG | C/9 | P1264L | GUGGACUGCCGCUCCUGC |
| flip_guide | | | | | ACCUGCGCCUCCA |
| | | | | | (SEQ ID NO: 617) |
| NM_002834.4_C- | PTPN11 | CCU | C/9 | L285F | GAUGAUCAACGGGCAGGA |
| flip_guide | | | | | UGUUUUUAUAUCU |
| | | | | | (SEQ ID NO: 618) |
| NM_004004.5_C- | GJB2 | ACG | C/5 | R77W | GGCCCCUAGCCGGAUGUG |
| flip_guide | | | | | GGAGAUGGGGAAG |
| | | | | | (SEQ ID NO: 619) |
| NM_004572.3_C- | PKP2 | CCG | C/9 | R796C | GUGUGUAACCGGCAGAGG |
| flip_guide | | | | | CUGUAGUUUCAAU |
| | | | | | (SEQ ID NO: 620) |
| NM_005609.3_C- | PYGM | GCG | C/9 | R798W | GCCGCGUCCCCUCUCUUG |
| flip_guide | | | | | GGUUCUUGUACAA |
| | | | | | (SEQ ID NO: 621) |
| NM_005633.3_C- | SOS1 | ACG | C/9 | T269M | GCAUCUGUCCUUUCUACU |
| flip_guide | | | | | GUAUCUUCUAUAU |
| | | | | | (SEQ ID NO: 622) |
| NM_014139.2_C- | SCN11A | CCG | C/9 | P396L | GCAACAGCCCGGGUUAAG |
| flip_guide | | | | | UUAAUCAGGUAGA |
| | | | | | (SEQ ID NO: 623) |
| NM_014874.3_C- | MFN2 | CCG | C/9 | P76L | GCAACAGCCCGGGUUAAG |
| flip_guide | | | | | UUAAUCAGGUAGA |
| | | | | | (SEQ ID NO: 624) |
| NM_015559.2_C- | SETBP1 | ACU | C/7 | T871I | GGUCCCACUGCCGCUGUC |
| flip_guide | | | | | GCUGGGGAUCGUC |
| | | | | | (SEQ ID NO: 625) |
| NM_020630.4_C- | RET | CCG | C/5 | R620C | GUCGCCGAAGCACUUCUC |
| flip_guide | | | | | CUCCUCAGGGAAG |
| | | | | | (SEQ ID NO: 626) |
| NM_000016.5_F_30bp_C- | ACADM | ACA | C/5 | H67Y | GUCAUCUUCUGCAGCCAC |
| flip_guide_30_5 | | | | | UGGGAUGAUUUCC |
| | | | | | (SEQ ID NO: 627) |
| NM_000016.5_F_30bp_C- | ACADM | ACA | C/7 | H67Y | GUAUCAUCUUCUGCAGCC |
| flip_guide_30_7 | | | | | ACUGGGAUGAUUU |
| | | | | | (SEQ ID NO: 628) |
| NM_000016.5_F_30bp_C- | ACADM | ACA | C/9 | H67Y | GUUUAUCAUCUUCUGCAG |
| flip_guide_30_9 | | | | | CCACUGGGAUGAU |
| | | | | | (SEQ ID NO: 629) |
| NM_000018.3_F_30bp_C- | ACADVL | GCG | C/5 | A283V | GCACCCCAAAAGCUGUGA |
| flip_guide_30_5 | | | | | UCUUCUCCUUCAC |
| | | | | | (SEQ ID NO: 630) |
| NM_000018.3_F_30bp_C- | ACADVL | GCG | C/7 | A283V | GUCCACCCCAAAAGCUGU |
| flip_guide_30_7 | | | | | GAUCUUCUCCUUC |
| | | | | | (SEQ ID NO: 631) |
| NM_000018.3_F_30bp_C- | ACADVL | GCG | C/9 | A283V | GUCUCCACCCCAAAAGCU |
| flip_guide_30_9 | | | | | GUGAUCUUCUCCU |
| | | | | | (SEQ ID NO: 632) |
| NM_000071.2_F_30bp_C- | CBS | GCG | C/5 | R109C | GUCACCCUUGGCCAAGAG |
| flip_guide_30_5 | | | | | CUCACACUUCAGG |
| | | | | | (SEQ ID NO: 633) |
| NM_000071.2_F_30bp_C- | CBS | GCG | C/7 | R109C | GACUCACCCUUGGCCAAG |
| flip_guide_30_7 | | | | | AGCUCACACUUCA |
| | | | | | (SEQ ID NO: 634) |
| NM_000071.2_F_30bp_C- | CBS | GCG | C/9 | R109C | GGAACUCACCCUUGGCCA |
| flip_guide_30_9 | | | | | AGAGCUCACACUU |
| | | | | | (SEQ ID NO: 635) |
| NM_000138.4_F_30bp_C- | FBN1 | GCG | C/5 | R1408C | GGAGCCCUCAUCAAGGUC |
| flip_guide_30_5 | | | | | UGUACAAGUGAAG |
| | | | | | (SEQ ID NO: 636) |
| NM_000138.4_F_30bp_C- | FBN1 | GCG | C/7 | R1408C | GCAGAGCCCUCAUCAAGG |
| flip_guide_30_7 | | | | | uCUGUACAAGUGA |
| | | | | | (SEQ ID NO: 637) |
| NM_000138.4_F_30bp_C- | FBN1 | GCG | C/9 | R1408C | GCUCAGAGCCCUCAUCAA |
| flip_guide_30_9 | | | | | GGUCUGUACAAGU |
| | | | | | (SEQ ID NO: 638) |
| NM_000141.4_F_30bp_C- | FGFR2 | CCC | C/5 | P267S | GGUGGCGGCAUUUGCCGG |
| flip_guide_30_5 | | | | | CAGUCCGGCUUGG |
| | | | | | (SEQ ID NO: 639) |
| NM_000141.4_F_30bp_C- | FGFR2 | CCC | C/7 | P267S | GCUGUGGCGGCAUUUGCC |
| flip_guide_30_7 | | | | | GGCAGUCCGGCUU |
| | | | | | (SEQ ID NO: 640) |
| NM_000141.4_F_30bp_C- | FGFR2 | CCC | C/9 | P267S | GCACUGUGGCGGCAUUUG |
| flip_guide_30_9 | | | | | CCGGCAGUCCGGC |
| | | | | | (SEQ ID NO: 641) |
| NM_000152.4_F_30bp_C- | GAA | CCC | C/5 | P552L | GCUGGCGGGUCCCCCCAA |
| flip_guide_30_5 | | | | | CCACCCCAGGCAC |
| | | | | | (SEQ ID NO: 642) |
| NM_000152.4_F_30bp_C- | GAA | CCC | C/7 | P552L | GGCCUGGCGGGUCCCCCC |
| flip_guide_30_7 | | | | | AACCACCCCAGGC |
| | | | | | (SEQ ID NO: 643) |
| NM_000152.4_F_30bp_C- | GAA | CCC | C/9 | P552L | GCCGCCUGGCGGGUCCCC |
| flip_guide_30_9 | | | | | CCAACCACCCCAG |
| | | | | | (SEQ ID NO: 644) |
| NM_000341.3_F_30bp_C- | SLC3A1 | ACG | C/5 | T467M | GAAGCCUGUUCAUCACGU |
| flip_guide_30_5 | | | | | UGACAUACUGAUU |
| | | | | | (SEQ ID NO: 645) |
| NM_000341.3_F_30bp_C- | SLC3A1 | ACG | C/7 | T467M | GAGAAGCCUGUUCAUCAC |
| flip_guide_30_7 | | | | | GUUGACAUACUGA |
| | | | | | (SEQ ID NO: 646) |
| NM_000341.3_F_30bp_C- | SLC3A1 | ACG | C/9 | T467M | GAAAGAAGCCUGUUCAUC |
| flip_guide_30_9 | | | | | ACGUUGACAUACU |
| | | | | | (SEQ ID NO: 647) |
| NM_000375.2_F_30bp_C- | UROS | ACG | C/5 | R73C | GAAACCUAACUCUGCUGC |
| flip_guide_30_5 | | | | | UUCCACUGCUCUG |
| | | | | | (SEQ ID NO: 648) |
| NM_000375.2_F_30bp_C- | UROS | ACG | C/7 | R73C | GCCAAACCUAACUCUGCU |
| flip_guide_30_7 | | | | | GCUUCCACUGCUC |
| | | | | | (SEQ ID NO: 649) |
| NM_000375.2_F_30bp_C- | UROS | ACG | C/9 | R73C | GCUCCAAACCUAACUCUG |
| flip_guide_30_9 | | | | | CUGCUUCCACUGC |
| | | | | | (SEQ ID NO: 650) |
| NM_000431.3_F_30bp_C- | MVK | ACA | C/5 | T268I | GAUCUCUUGAGGUCAGGA |
| flip_guide_30_5 | | | | | GGGGGGCCACGAU |
| | | | | | (SEQ ID NO: 651) |
| NM_000431.3_F_30bp_C- | MVK | ACA | C/7 | T268I | GGCAUCUCUUGAGGUCAG |
| flip_guide_30_7 | | | | | GAGGGGGGCCACG |
| | | | | | (SEQ ID NO: 652) |
| NM_000431.3_F_30bp_C- | MVK | ACA | C/9 | T268I | GUGGCAUCUCUUGAGGUC |
| flip_guide_30_9 | | | | | AGGAGGGGGGCCA |
| | | | | | (SEQ ID NO: 653) |
| NM_000551.3_F_30bp_C- | VHL | CCG | C/5 | P158L | GUUUCCGAGUAUACACUG |
| flip_guide_30_5 | | | | | GCAGUGUGAUAUU |
| | | | | | (SEQ ID NO: 654) |
| NM_000551.3_F_30bp_C- | VHL | CCG | C/7 | P158L | GUCUUUCCGAGUAUACAC |
| flip_guide_30_7 | | | | | UGGCAGUGUGAUA |
| | | | | | (SEQ ID NO: 655) |
| NM_000551.3_F_30bp_C- | VHL | CCG | C/9 | P158L | GGCUCUUUCCGAGUAUAC |
| flip_guide_30_9 | | | | | ACUGGCAGUGUGA |
| | | | | | (SEQ ID NO: 656) |
| NM_001256850.1_F_30bp_C- | TTN | ACG | C/5 | R30071C | GCCACCUGGGCCAGGGGA |
| flip_guide_30_5 | | | | | AUCAAGCACUUUG |
| | | | | | (SEQ ID NO: 657) |
| NM_001256850.1_F_30bp_C- | TTN | ACG | C/7 | R30071C | GUUCCACCUGGGCCAGGG |
| flip_guide_30_7 | | | | | GAAUCAAGCACUU |
| | | | | | (SEQ ID NO: 658) |
| NM_001256850.1_F_30bp_C | TTN | ACG | C/9 | R30071C | GCUUUCCACCUGGGCCAG |
| flip_guide_30_9 | | | | | GGGAAUCAAGCAC |
| | | | | | (SEQ ID NO: 659) |
| NM_002397.4_F_30bp_C- | MEF2C | ACG | C/5 | T1M | GCCCCCUAGUCCCCGUUU |
| flip_guide_30_5 | | | | | UUCUUCUCUCUCU |
| | | | | | (SEQ ID NO: 660) |
| NM_002397.4_F_30bp_C- | MEF2C | ACG | C/7 | T1M | GCUCCCCCUAGUCCCCGU |
| flip_guide_30_7 | | | | | UUUUCUUCUCUCU |
| | | | | | (SEQ ID NO: 661) |
| NM_002397.4_F_30bp_C- | MEF2C | ACG | C/9 | T1M | GUUCUCCCCCUAGUCCCC |
| flip_guide_30_9 | | | | | GUUUUUCUUCUCU |
| | | | | | (SEQ ID NO: 662) |
| NM_002474.2_F_30bp_C- | MYH11 | CCG | C/5 | P1264L | GCUGCCGCUCCUGCACCU |
| flip_guide_30_5 | | | | | GCGCCUCCAGCUU |
| | | | | | (SEQ ID NO: 663) |
| NM_002474.2_F_30bp_C- | MYH11 | CCG | C/7 | P1264L | GGACUGCCGCUCCUGCAC |
| flip_guide_30_7 | | | | | CUGCGCCUCCAGC |
| | | | | | (SEQ ID NO: 664) |
| NM_002474.2_F_30bp_C- | MYH11 | CCG | C/9 | P1264L | GUGGACUGCCGCUCCUGC |
| flip_guide_30_9 | | | | | ACCUGCGCCUCCA |
| | | | | | (SEQ ID NO: 665) |
| NM_002834.4_F_30bp_C- | PTPN11 | CCU | C/5 | L285F | GUCAACGGGCAGGAUGUU |
| flip_guide_30_5 | | | | | UUUAUAUCUAUUU |
| | | | | | (SEQ ID NO: 666) |
| NM_002834.4_F_30bp_C- | PTPN11 | CCU | C/7 | L285F | GGAUCAACGGGCAGGAUG |
| flip_guide_30_7 | | | | | UUUUUAUAUCUAU |
| | | | | | (SEQ ID NO: 667) |
| NM_002834.4_F_30bp_C- | PTPN11 | CCU | C/9 | L285F | GAUGAUCAACGGGCAGGA |
| flip_guide_30_9 | | | | | UGUUUUUAUAUCU |
| | | | | | (SEQ ID NO: 668) |
| NM_004004.5_F_30bp_C- | GJB2 | ACG | C/5 | R77W | GGCCCCUAGCCGGAUGUG |
| flip_guide_30_5 | | | | | GGAGAUGGGGAAG |
| | | | | | (SEQ ID NO: 669) |
| NM_004004.5_F_30bp_C- | GJB2 | ACG | C/7 | R77W | GGGGCCCCUAGCCGGAUG |
| flip_guide_30_7 | | | | | UGGGAGAUGGGGA |
| | | | | | (SEQ ID NO: 670) |
| NM_004004.5_F_30bp_C- | GJB2 | ACG | C/9 | R77W | GCAGGGCCCCUAGCCGGA |
| flip_guide_30_9 | | | | | UGUGGGAGAUGGG |
| | | | | | (SEQ ID NO: 671) |
| NM_004572.3_F_30bp_C- | PKP2 | CCG | C/5 | R796C | GUAACCGGCAGAGGCUGU |
| flip_guide_30_5 | | | | | AGUUUCAAUGAGA |
| | | | | | (SEQ ID NO: 672) |
| NM_004572.3_F_30bp_C- | PKP2 | CCG | C/7 | R796C | GUGUAACCGGCAGAGGCU |
| flip_guide_30_7 | | | | | GUAGUUUCAAUGA |
| | | | | | (SEQ ID NO: 673) |
| NM_004572.3_F_30bp_C- | PKP2 | CCG | C/9 | R796C | GUGUGUAACCGGCAGAGG |
| flip_guide_30_9 | | | | | CUGUAGUUUCAAU |
| | | | | | (SEQ ID NO: 674) |
| NM_005609.3_F_30bp_C- | PYGM | GCG | C/5 | R798W | GGUCCCCUCUCUUGGGUU |
| flip_guide_30_5 | | | | | CUUGUACAAGGCG |
| | | | | | (SEQ ID NO: 675) |
| NM_005609.3_F_30bp_C- | PYGM | GCG | C/7 | R798W | GGCGUCCCCUCUCUUGGG |
| flip_guide_30_7 | | | | | UUCUUGUACAAGG |
| | | | | | (SEQ ID NO: 676) |
| NM_005609.3_F_30bp_C- | PYGM | GCG | C/9 | R798W | GCCGCGUCCCCUCUCUUG |
| flip_guide_30_9 | | | | | GGUUCUUGUACAA |
| | | | | | (SEQ ID NO: 677) |
| NM_005633.3_F_30bp_C- | SOS1 | ACG | C/5 | T269M | GUGUCCUUUCUACUGUAU |
| flip_guide_30_5 | | | | | CUUCUAUAUGGCC |
| | | | | | (SEQ ID NO: 678) |
| NM_005633.3_F_30bp_C- | SOS1 | ACG | C/7 | T269M | GUCUGUCCUUUCUACUGU |
| flip_guide_30_7 | | | | | AUCUUCUAUAUGG |
| | | | | | (SEQ ID NO: 679) |
| NM_005633.3_F_30bp_C- | SOS1 | ACG | C/9 | T269M | GCAUCUGUCCUUUCUACU |
| flip_guide_30_9 | | | | | GUAUCUUCUAUAU |
| | | | | | (SEQ ID NO: 680) |
| NM_014139.2_F_30bp_C- | SCN11A | CCG | C/5 | P396L | GAGCCCGGGUUAAGUUAA |
| flip_guide_30_5 | | | | | UCAGGUAGAAGGA |
| | | | | | (SEQ ID NO: 681) |
| NM_014139.2_F_30bp_C- | SCN11A | CCG | C/7 | P396L | GACAGCCCGGGUUAAGUU |
| flip_guide_30_7 | | | | | AAUCAGGUAGAAG |
| | | | | | (SEQ ID NO: 682) |
| NM_014139.2_F_30bp_C- | SCN11A | CCG | C/9 | P396L | GCAACAGCCCGGGUUAAG |
| flip_guide_30_9 | | | | | UUAAUCAGGUAGA |
| | | | | | (SEQ ID NO: 683) |
| NM_014874.3_F_30bp_C- | MFN2 | CCG | C/5 | P76L | GGUCCCGAACCUGUUCUU |
| flip_guide_30_5 | | | | | CUGUGGUAACGGG |
| | | | | | (SEQ ID NO: 684) |
| NM_014874.3_F_30bp_C- | MFN2 | CCG | C/7 | P76L | GACGUCCCGAACCUGUUC |
| flip_guide_30_7 | | | | | UUCUGUGGUAACG |
| | | | | | (SEQ ID NO: 685) |
| NM_014874.3_F_30bp_C- | MFN2 | CCG | C/9 | P76L | GUGACGUCCCGAACCUGU |
| flip_guide_30_9 | | | | | UCUUCUGUGGUAA |
| | | | | | (SEQ ID NO: 686) |
| NM_015559.2_F_30bp_C- | SETBP1 | ACU | C/5 | T871I | GCCCACUGCCGCUGUCGC |
| flip_guide_30_5 | | | | | UGGGGAUCGUCUC |
| | | | | | (SEQ ID NO: 687) |
| NM_015559.2_F_30bp_C- | SETBP1 | ACU | C/7 | T871I | GGUCCCACUGCCGCUGUC |
| flip_guide_30_7 | | | | | GCUGGGGAUCGUC |
| | | | | | (SEQ ID NO: 688) |
| NM_015559.2_F_30bp_C- | SETBP1 | ACU | C/9 | T871I | GCUGUCCCACUGCCGCUG |
| flip_guide_30_9 | | | | | UCGCUGGGGAUCG |
| | | | | | (SEQ ID NO: 689) |
| NM_020630.4_F_30bp_C- | RET | CCG | C/5 | R620C | GUCGCCGAAGCACUUCUC |
| flip_guide_30_5 | | | | | CUCCUCAGGGAAG |
| | | | | | (SEQ ID NO: 690) |
| NM_020630.4_F_30bp_C- | RET | CCG | C/7 | R620C | GGCUCGCCGAAGCACUUC |
| flip_guide_30_7 | | | | | UCCUCCUCAGGGA |
| | | | | | (SEQ ID NO: 691) |
| NM_020630.4_F_30bp_C- | RET | CCG | C/9 | R620C | GGGGCUCGCCGAAGCACU |
| flip_guide_30_9 | | | | | UCUCCUCCUCAGG |
| | | | | | (SEQ ID NO: 692) |
| ApoE4 | APOE | GCG | C/30 | C130R | Gccacguccuccaugucc |
| rs429358 C | | | | | gcgcccagccggg |
| flip 30 | | | | | (SEQ ID NO: 693) |
| ApoE4 | APOE | GCG | C/28 | C130R | Ggcccacguccuccaugu |
| rs429358 C | | | | | ccgcgcccagccg |
| flip 28 | | | | | (SEQ ID NO: 694) |
| ApoE4 | APOE | GCG | C/26 | C130R | Gccgcccacguccuccau |
| rs429358 C | | | | | guccgcgcccagc |
| flip 26 | | | | | (SEQ ID NO: 695) |
| ApoE4 | APOE | GCG | C/24 | C130R | Gggccgcccacguccucc |
| rs429358 C | | | | | auguccgcgccca |
| flip 24 | | | | | (SEQ ID NO: 696) |
| ApoE4 | APOE | GCG | C/22 | C130R | Ggcggccgcccacguccu |
| rs429358 C | | | | | ccauguccgcgcc |
| flip 22 | | | | | (SEQ ID NO: 697) |
| ApoE4 | APOE | GCG | C/20 | C130R | Gaggcggccgcccacguc |
| rs429358 C | | | | | cuccauguccgcg |
| flip 20 | | | | | (SEQ ID NO: 698) |
| ApoE4 | APOE | GCG | C/18 | C130R | Gccaggcggccgcccacg |
| rs429358 C | | | | | uccuccauguccg |
| flip 18 | | | | | (SEQ ID NO: 699) |
| ApoE4 | APOE | GCG | C/16 | C130R | Gcaccaggcggccgccca |
| rs429358 C | | | | | cguccuccauguc |
| flip 16 | | | | | (SEQ ID NO: 700) |
| ApoE4 rs7412 | APOE | GCG | C/30 | C176R | Gccuucugcaggucaucg |
| C flip 30 | | | | | gcaucgcggagga |
| | | | | | (SEQ ID NO: 701) |
| ApoE4 rs7412 | APOE | GCG | C/28 | C176R | Ggcccuucugcaggucau |
| C flip 28 | | | | | cggcaucgcggag |
| | | | | | (SEQ ID NO: 702) |
| ApoE4 rs7412 | APOE | GCG | C/26 | C176R | Gaggcccuucugcagguc |
| C flip 26 | | | | | aucggcaucgcgg |
| | | | | | (SEQ ID NO: 703) |
| ApoE4 rs7412 | APOE | GCG | C/24 | C176R | Gccaggcccuucugcagg |
| C flip 24 | | | | | ucaucggcaucgc |
| | | | | | (SEQ ID NO: 704) |
| ApoE4 rs7412 | APOE | GCG | C/22 | C176R | Gugccaggcccuucugca |
| C flip 22 | | | | | ggucaucggcauc |
| | | | | | (SEQ ID NO: 705) |
| ApoE4 rs7412 | APOE | GCG | C/20 | C176R | Gacugccaggcccuucug |
| C flip 20 | | | | | caggucaucggca |
| | | | | | (SEQ ID NO: 706) |
| ApoE4 rs7412 | APOE | GCG | C/18 | C176R | Gacacugccaggcccuuc |
| C flip 18 | | | | | ugcaggucaucgg |
| | | | | | (SEQ ID NO: 707) |
| ApoE4 rs7412 | APOE | GCG | C/16 | C176R | Gguacacugccaggcccu |
| C flip 16 | | | | | ucugcaggucauc |
| | | | | | (SEQ ID NO: 708) |

TABLE 24
Mammalian plasmids and maps

| Plasmid | Description | Benchling link |
|---|---|---|
| pC0043 | PspCas13b crRNA | benchling.com/s/seq- |
| | backbone | OH6nMmZCZn930BWqcFNa |
| pC0076 | CMV-dCas13b6-mapkNES- | benchling.com/s/seq- |
| | GS-dADAR2 E488Q | BulRvsrtwP4aEJtTqYM2 |
| pC0077 | pCMV-dCas13b6-mapkNES- | benchling.com/s/seq- |
| | GS-dADAR2(E488Q/V351G/ | gQ13PMPLkcO6OceAfmpC |
| | S486A/T375S/S370C/P462A/ | |
| | N597I/L332I/I398V) | |
| | RESCUEv8 | |
| pC0078 | pCMV-dCas13b6-mapkNES- | benchling.com/s/seq- |
| | GS-dADAR2(E488Q/V351G/ | 19Ytwwh0i0vSIbyXYZ95 |
| | S486A/T375S/S370C/P462A/ | |
| | N597I/L332I/I398V/K350I/ | |
| | M383L/D619G/S582T/V440I/ | |
| | S495N/K418E/S661T) V16 | |
| pC0079 | pCMV-dCas13b6-mapkNES- | benchling.com/s/seq- |
| | GS-dADAR2(E488Q/V351G/ | WX6VnavLS6JaaZ54XAOx |
| | S486A/T375A/S370C/P462A/ | |
| | N597I/L332I/I398V/K350I/ | |
| | M383L/D619G/S582T/V440I/ | |
| | S495N/K418E/S661T) V16S | |
| pC0080 | pCMV-dCas13b12-HIVNES- | benchling.com/s/seq- |
| | GS-dADAR2(E488Q/V351G/ | GQqPCRE916KnEfHksQem |
| | S486A/T375S/S370C/P462A/ | |
| | N597I/L332I/I398V/K350I/ | |
| | M383L/D619G/S582T/V440I/ | |
| | S495N/K418E/S661T) V16 | |
| pC0081 | pCMV-dCas13b12-HIVNES- | benchling.com/s/seq- |
| | GS-dADAR2(E488Q/V351G/ | qjbEAXZgupeRXBa8ablS |
| | S486A/T375S/S370C/P462A/ | |
| | N597I/L332I/I398V/K350I/ | |
| | M383L/D619G/S582T/V440I/ | |
| | S495N/K418E/S661T/ | |
| | S375A) V16S | |
| pC0082 | CMV-Cluciferase-polyA EF1a- | benchling.com/s/seq- |
| | G-luciferase(C82R)-polyA C | Qjsg3Yx0r1Hs77GT58BI |
| | to U reporter TCG motif | |
| pC0083 | CMV-Cluciferase-polyA EF1a- | benchling.com/s/seq- |
| | G-luciferase(C82R)-polyA C | Z8zwu3LdetcuYHAFGnpe |
| | to U reporter GCG motif | |
| pC0084 | CMV-Cluciferase-polyA EF1a- | benchling.com/s/seq- |
| | G-luciferase(C82R)-polyA C | G2Iag6I8NBQAXqbJnou5 |
| | to U reporter ACG motif | |
| pC0085 | CMV-Cluciferase-polyA EF1a- | benchling.com/s/seq- |
| | G-luciferase(C82R)-polyA C | alkwhNUsFTg80TVmpquP |
| | to U reporter CCG motif | |
| pC0086 | CMV-Cluciferase-polyA EF1a- | benchling.com/s/seq- |
| | G-luciferase(L77P)-polyA C | 1J8Fm6vtF7GS676Q7pwS |
| | to U reporter CCA motif | |
| pC0087 | CMV-Cluciferase-polyA EF1a- | benchling.com/s/seq- |
| | G-luciferase(L77P)-polyA C | 5MMokwvxoAjq6ML2sjjZ |
| | to U reporter CCT motif | |
| pC0088 | pCMV-ADAR2dd(E488Q/ | benchling.com/s/seq- |
| | V351G/S486A/T375S/ | YISAybq2YnuclVwYDy95 |
| | S370C/P462A/N597I/ | |
| | L332I/I398V/K350I/ | |
| | M383L/D619G/S582T/ | |
| | V440I/S495N/K418E/ | |
| | S661T) V16 | |
| pC0089 | pCMV-ADAR2 full length | benchling.com/s/seq- |
| | (E488Q/V351G/S486A/T375S/ | 95ZpoHj9GhQFzIu3m6cb |
| | S370C/P462A/N597I/L332I/ | |
| | I398V/K350I/M383L/D619G/ | |
| | S582T/V440I/S495N/K418E/ | |
| | S661T) V16 | |
| pC0090 | Beta catenin reporter M50 | benchling.com/s/seq- |
| | Super 8x (TCF/LEF binding | jPxZnxs3wSeKZhgTTDBu |
| | sites) TOPFlash with | |
| | Gluc/Cluc | |
| pC0091 | Beta catenin reporter | benchling.com/s/seq- |
| | control M51 Super 8x | 130b6c9baCfw8R3lTgSR |
| | (mutated TCF/LEF binding | |
| | sites) FOPFlash with | |
| | Gluc/Cluc | |

TABLE 25
Yeast plasmids and maps

| Plasmid | Description | Benchling link |
|---|---|---|
| pC0092 | pGAL-dCas13b6-GS- | benchling.com/s/seq- |
| | dADAR2 [RESCUE v0 Yeast] | w1l2aOHR2gSe4P2aQ7VY |
| pC0093 | pGAL-dCas13b6-GS- | benchling.com/s/seq- |
| | dADAR2(V351/S486A/T375S) | saQngvNf6i3GhSGF0H3I |
| | [RESCUE v3 Yeast] | |
| pC0094 | pGAL-dCas13b6-GS- | benchling.com/s/seq- |
| | dADAR2(V351G/S486A/T375S/ | GIJ7BnpV3Vd3XtKiIxdm |
| | S370C/P462A/L332I) | |
| | [RESCUE v7 Yeast] | |
| pC0095 | pGAL-dCas13b6-GS- | benchling.com/s/seq- |
| | dADAR2(V351/S486A/T375S/ | vRnAMIwozJk5r6LmOCgG |
| | S370C/P462A/N597I/L332I/ | |
| | I398V/K350I/M383L/D619G/ | |
| | S582T/V440I/S495N/K418/ | |
| | ES661T) | |
| | [RESCUE v16 Yeast] | |
| pC0096 | pYES3/CT pADH1-HH- | benchling.com/s/seq- |
| | Targeting-B6_DR-HDV--space- | Xs2ffVMn4FwwQ79zDDEo |
| | ADH1_terminator His (P196L) | |
| | [Yeast target His P196L] | |
| pC0097 | pYES3/CT pADH1-HH- | benchling.com/s/seq- |
| | Golden-gate-BsmBi- | UM9NjG7JKK0GFe9MowGo |
| | BsmbI_DR--HDV-space- | |
| | ADH1_terminator His (P196L) | |
| | [Yeast target His P196L NT] | |
| pC0098 | pYES3/CT pADH1-HH- | benchling.com/s/seq- |
| | Guide-B6_DR--HDV-space- | EefJI5brqll3fm0B5Qc5 |
| | ADH1_terminator His S129P | |
| | [Yeast target His S129P] | |
| pC0099 | pYES3/CT pADH1-HH- | benchling.com/s/seq- |
| | Golden-gate-BsmBi- | bt7gOlrp8OuOoV3YJWZG |
| | BsmbI_DR--HDV-space- | |
| | ADH1_terminator His Motifs | |
| | S129P | |
| | [Yeast target His S129P NT] | |
| pC0100 | pYES3/CT pADH1-HH- | benchling.com/s/seq- |
| | Y66H-targeting-B6-DR-HDV- | HiMELqTYPT9y0nOAKEq2 |
| | ADH1-term ATG-yeGFP Y66H | |
| | [Yeast target GFP Y66H] | |
| pC0101 | pYES3/CT pADH1-HH- | benchling.com/s/seq- |
| | Golden-gate-BsmBi- | OCWlvnjeKYwSbG8GELTQ |
| | BsmbI_-B6_DR-HDV- | |
| | ADH1-term ATG-yeGFP Y66H | |
| | Reporter | |
| | [Yeast target GFP Y66H NT] | |

TABLE 26
Guide sequences used for yeast targeting

| | | | Base | | |
|---|---|---|---|---|---|
| | | | flip/spacer | | |
| | Targeted | | length/ | Codon | |
| Name | gene | Motif | position | change | Spacer sequence |
| His L196P | HIS | CCU | U/50/34 | L196P | Ucuuauggcaaccgcaug |
| targeting | | | | | agccuugaacgcacucuc |
| | | | | | acuacggugaugau |
| | | | | | (SEQ ID NO: 709) |
| His S129P | HIS | UCC | C/30/26 | S129P | Gcuugcaagugccucauc |
| targeting | | | | | caaaggcgcaaau |
| | | | | | (SEQ ID NO: 710) |
| His Y66H | EGFP | UCA | U/50/34 | Y66H | Aaacauugaacaccauua |
| targeting | | | | | guuaaaguagugacuaag |
| | | | | | guuggccauggaac |
| | | | | | (SEQ ID NO: 711) |

[1335] Mammalian Cell Culture

[1336] Unless otherwise stated, mammalian cell culture experiments were performed in the HEK293FT line (American Type Culture Collection (ATCC)), grown in Dulbecco's Modified Eagle Medium containing glucose, sodium pyruvate, and GlutaMAX (Thermo Fisher Scientific), and supplemented with 1× penicillin-streptomycin (Thermo Fisher Scientific) and 10% fetal bovine serum (VWR Seradigm). Cells were maintained at confluency below 80%.

[1337] Unless otherwise noted, all transfections were performed with Lipofectamine 2000 (Thermo Fisher Scientific) in 96-well plates coated with poly-D-lysine (BD Biocoat). Cells were plated at approximately 20,000 cells/well 16 hours prior to transfection to ensure 90% confluency at the time of transfection. For each well on the plate, transfection plasmids were combined with Opti-MEM I Reduced Serum Medium (Thermo Fisher Scientific) to a total of 25 μl. Separately, 24.5 μl of Opti-MEM was combined with 0.5 μl of Lipofectamine 2000. Plasmid and Lipofectamine solutions were then combined and incubated for 5 minutes, after which they were pipetted onto cells.

[1338] RESCUE Editing in Mammalian Cells

[1339] To assess RESCUE activity in mammalian cells, Applicants transfected 150 ng of RESCUE vector, 300 ng of guide expression plasmid, and, when using a reporter (either luciferase, STAT activity, or Beta Catenin activity), 40 ng of the RNA editing reporter. After 48 hours, RNA from cells was harvested and reverse transcribed using a method previously described(33) with a gene specific reverse transcription primer. The extracted cDNA was then subjected to two rounds of PCR to add Illumina adaptors and sample barcodes using NEBNext High-Fidelity 2×PCR Master Mix (New England Biolabs). The library was then subjected to next generation sequencing on an Illumina NextSeq or MiSeq. RNA editing rates were then evaluated at all adenosines within the sequencing window.

[1340] In experiments where the luciferase reporter was targeted for RNA editing, Applicants also harvested the media with secreted luciferase prior to RNA harvest. Applicants measured luciferase activity with Cypridinia and Gaussia luciferase assay kits (Targeting Systems) on a plate reader (Biotek Synergy Neo2) with an injection protocol. All replicates performed are biological replicates.

[1341] In experiments where the input amount of RESCUE plasmid was varied, total plasmid amount was kept constant by replacing RESCUE expression plasmid with a filler plasmid expressing a CMV-driven mScarlet, except where noted. In the experiment where input amount of guide plasmid was varied, total plasmid amount was either kept constant (“with filler plasmid”) via substitution of non-targeting guide, or not kept constant (“without filler plasmid”); in this experiment, there was no filler plasmid for the RESCUE plasmid.

[1342] Biochemical Characterization of RESCUE Mutations on ADAR2dd

[1343] To assess the kinetic activity of hADAR2 deaminase domain containing RESCUE mutations, multiple iterations were cloned into a pGAL-His6-TwinStrep-SUMO-hADAR2dd backbone containing the URA3 gene. The plasmids were transformed into BCY123 competent yeast cells. Briefly, frozen cells were thawed in 37° C. water bath for 15-30 seconds. 10 μL of cells per condition were centrifuged at 13,000 g in a microcentrifuge for 2 minutes and supernatant was removed. The prepared transformation mix for each construct contained 260 μL PEG 3350 prepared at 50% w/v, 50 μL of denatured salmon sperm (Thermo Fisher Scientific), 36 μL 1M Lithium Acetate, and 750 ng of plasmid in 14 μL of DI H2O. The yeast pellet was resuspended with the transformation mix and incubated in a 42° C. water bath for 30 minutes before centrifugation at 13,000 g for 30 seconds and subsequent supernatant removal. The pellet was then resuspended in 1 mL of DI H2O and 50 μL was taken into 1 mL of DI H2O for mixing. Subsequently, 200 μL was plated onto minimal glucose plates minus uracil for prototrophic selection.

[1344] Plates were incubated at 30° C. for 48 hr before seeding single colonies into 10 mL cultures of yeast minimal media supplemented with dextrose. This included yeast dropout supplement Y2001 (1.39 g/L), yeast nitrogen base without amino acids (6.7 g/L), adenine hemisulfate (0.022 g/L), histidine (0.076 g/L), leucine (0.38 g/L), tryptophan (0.076 g/L), and dextrose (20 g/L). Cultures were grown overnight before seeding the entire 10 mL into a 100 mL minimal media/dextrose culture. Following 8 hours of growth, each construct was seeded into two 2 L flasks containing 1 L of minimal media supplemented with 20 g of raffinose (VWR). These were grown overnight and induced with 100 mL of 30% galactose for eight hours before harvesting. Cultures were spun down in a Beckman Coulter Avanti J-E centrifuge at 6,000 r.p.m. for 20 minutes with pellets stored at −80° C.

[1345] Purification Methods

[1346] Whole-Transcriptome Sequencing to Evaluate ADAR Editing Specificity

[1347] For analyzing off-target RNA editing sites across the transcriptome, Applicants harvested total RNA from cells 48 hours post-transfection using the RNeasy Plus Miniprep kit (Qiagen). The mRNA fraction was then enriched using a NEBNext Poly(A) mRNA Magnetic Isolation Module (NEB) and this RNA was then prepared for sequencing using an NEBNext Ultra RNA Library Prep Kit for Illumina (NEB). The libraries were then sequenced on an Illumina NextSeq and loaded such that there were at least 5 million reads per sample.

[1348] RNA Editing Analysis for Targeted and Transcriptome-Wide Experiments

[1349] Analysis of the transcriptome-wide editing RNA sequencing data was performed on the FireCloud computational framework (software/broadinstitute.org/firecloud/) using a custom workflow Applicants developed: portal.firecloud.org/methods/m/rna_editing_final_workflow/rna_editing_final_workflow/l. For analysis, unless otherwise denoted, sequence files were randomly downsampled to 5 million reads. An index was generated using the RefSeq GRCh38 assembly with Gluc and Cluc sequences added, and reads were aligned and quantified using Bowtie/RSEM version 1.3.0. Alignment BAMs were then sorted and analyzed for RNA editing sites using REDitools (35, 36) with the following parameters: -t 8 -e -d -l -U [AG or TC or CT or GA]-p -u -m20 -T6-0 -W -v l -n 0.0. Any significant edits found in untransfected or EGFP-transfected conditions were considered to be SNPs or artifacts of the transfection and filtered out from the analysis of off-targets. Off-targets were considered significant if the Fisher's exact test yielded a p-value less than 0.05 after multiple hypothesis correction by Benjamini Hochberg correction and at least 2 of 3 biological replicates identified the edit site. Overlap of edits between samples was calculated relative to the maximum possible overlap, equivalent to the fewer number of edits between the two samples. The percentage of overlapping edit sites was calculated as the number of shared edit sites divided by minimum number of edits of the two samples, multiplied by 100. An additional layer of filtering for known SNP positions was performed using the Kaviar (37) method for identifying SNPs.

[1350] Differential Gene Expression Analysis

[1351] Stat Phenotype Assay

[1352] Cells were transfected with RESCUE plasmids, guide plasmids targeting residues on STAT3 and STAT1, and a luciferase reporter for STAT3 (Qiagen Cignal STAT3 Reporter) and STAT1 signaling (Qiagen Cignal GAS Reporter) using lipofectamine 2000, as described above and incubated for 48 hours. After 48 hours, the Dual-Glo Luciferase Assay (Promega) was used to measure firefly and renilla luciferase activity in the cells. The firefly signal was normalized to the renilla signal to measure the relative activation of STAT3 and STAT1.

[1353] Beta Catenin Phenotype Assay

[1354] Cells were plated 24 hours prior to transfection in cell migration plates containing cores that prevent cell growth in the center of the well. After 24 hours, cells were transfected with RESCUE plasmids, guide plasmids targeting residues on Beta-catenin, and a luciferase reporter for Beta-catenin activation (Qiagen TCF/LEF Cignal Reporter) using lipofectamine 2000, as described above and incubated. After 24 hours, central cores were removed to allow for cell growth towards the center of the well. After another 24 hours of incubation, media was assayed for Gluc and Cluc luciferase signal. The relative ratio of Gluc to Cluc was calculated to determine the relative Beta catenin activation between conditions. On day 3 cells were incubated for 10 minutes with CellTracker Green CMFDA Dye (ThermoFisher Scientific) and then washed with media. Cells were imaged daily using fluorescence to measure cell growth. Cell growth into the central area of the well was measured using ImageJ software by calculating the total area of fluorescence in the central growth region. Images were processed using an automated macro with the following commands:

//ImageJ macro for calculating cellular area
run(“8-bit”);
run(“Auto Local Threshold”, “method=Bernsen radius=15 parameter_1=0

parameter_2=0 white”);

setAutoThreshold(“Default dark”);
run(“Measure”);

### REFERENCES

[1355] 1. S. Shmakov et al., Discovery and Functional Characterization of Diverse Class 2 CRISPR-Cas Systems. Mol Cell 60, 385-397 (2015).
[1356] 2. S. Shmakov et al., Diversity and evolution of class 2 CRISPR-Cas systems. Nat Rev Microbiol 15, 169-182 (2017).
[1357] 3. A. A. Smargon et al., Cas13b Is a Type VI-B CRISPR-Associated RNA-Guided RNase Differentially Regulated by Accessory Proteins Csx27 and Csx28. Mol Cell 65, 618-630 e617 (2017).
[1358] 4. O. O. Abudayyeh et al., C2c2 is a single-component programmable RNA-guided RNA-targeting CRISPR effector. Science 353, aaf5573 (2016).
[1359] 5. S. Konermann et al., Transcriptome Engineering with RNA-Targeting Type VI-D CRISPR Effectors. Cell 173, 665-676 e614 (2018).
[1360] 6. W. X. Yan et al., Cas13d Is a Compact RNA-Targeting Type VI CRISPR Effector Positively Modulated by a WYL-Domain-Containing Accessory Protein. Mol Cell 70, 327-339 e325 (2018).
[1361] 7. A. East-Seletsky et al., Two distinct RNase activities of CRISPR-C2c2 enable guide-RNA processing and RNA detection. Nature 538, 270-273 (2016).
[1362] 8. J. S. Gootenberg et al., Nucleic acid detection with CRISPR-Cas13a/C2c2. Science 356, 438-442 (2017).
[1363] 9. O. O. Abudayyeh et al., RNA targeting with CRISPR-Cas13. Nature 550, 280-284 (2017).
[1364] 10. A. East-Seletsky, M. R. O'Connell, D. Burstein, G. J. Knott, J. A. Doudna, RNA Targeting by Functionally Orthogonal Type VI-A CRISPR-Cas Enzymes. Mol Cell 66, 373-383 e373 (2017).
[1365] 11. D. B. T. Cox et al., RNA editing with CRISPR-Cas13. Science 358, 1019-1027 (2017).
[1366] 12. J. S. Gootenberg et al., Multiplexed and portable nucleic acid detection platform with Cas13, Cas12a, and Csm6. Science 360, 439-444 (2018).
[1367] 13. H. Nishimasu et al., Crystal structure of Cas9 in complex with guide RNA and target DNA. Cell 156, 935-949 (2014).
[1368] 14. T. Yamano et al., Crystal Structure of Cpf1 in Complex with Guide RNA and Target DNA. Cell 165, 949-962 (2016).
[1369] 15. L. Holm, L. M. Laakso, Dali server update. Nucleic Acids Res 44, W351-355 (2016).
[1370] 16. H. Yang, P. Gao, K. R. Rajashankar, D. J. Patel, PAM-Dependent Target DNA Recognition and Cleavage by C2c1 CRISPR-Cas Endonuclease. Cell 167, 1814-1828 e1812 (2016).
[1371] 17. L. Liu et al., Two Distant Catalytic Sites Are Responsible for C2c2 RNase Activities. Cell 168, 121-134 e112 (2017).
[1372] 18. L. Liu et al., The Molecular Architecture for RNA-Guided RNA Cleavage by Cas13a. Cell 170, 714-726 e710 (2017).
[1373] 19. G. J. Knott et al., Guide-bound structures of an RNA-targeting A-cleaving CRISPR-Cas13a enzyme. Nat Struct Mol Biol 24, 825-833 (2017).
[1374] 20. N. F. Sheppard, C. V. Glover, 3rd, R. M. Terns, M. P. Terns, The CRISPR-associated Csx1 protein of Pyrococcus furiosus is an adenosine-specific endoribonuclease. RNA 22, 216-224 (2016).
[1375] 21. Z. Wu, H. Yang, P. Colosi, Effect of genome size on AAV vector packaging. Mol Ther 18, 80-86 (2010).
[1376] 22. X. J. Lu, H. J. Bussemaker, W. K. Olson, DSSR: an integrated software tool for dissecting the spatial structure of RNA. Nucleic Acids Res 43, e142 (2015).
[1377] 23. I. Fonfara, H. Richter, M. Bratovic, A. Le Rhun, E. Charpentier, The CRISPR-associated DNA-cleaving enzyme Cpf1 also processes precursor CRISPR RNA. Nature 532, 517-521 (2016).
[1378] 24. D. Milburn, R. A. Laskowski, J. M. Thornton, Sequences annotated by structure: a tool to facilitate the use of structural information in sequence analysis. Protein Eng 11, 855-859 (1998).
[1379] 25. I. M. Slaymaker et al., Rationally engineered Cas9 nucleases with improved specificity. Science 351, 84-88 (2016).
[1380] 26. L. Gao et al., Engineered Cpf1 variants with altered PAM specificities. Nat Biotechnol 35, 789-792 (2017).

### Example 14—Transformation of the Adenine Deaminase ADAR2 into a Cytosine Deaminase for Programmable RNA Editing

[1381] Programmable RNA editing can enable reversible recoding of RNA information for research and disease treatment. Here, this example shows a C to U RNA editor, referred to as RNA Editing for Specific C to U Exchange (RESCUE), by directly evolving ADAR2 into a cytidine deaminase. RESCUE doubled the number of pathogenic mutations targetable by RNA editing and enables modulation of phosphosignaling-relevant residues, such as threonine and serine. Applicants applied RESCUE to drive β-catenin activation and cellular growth. Furthermore, RESCUE retained A to I editing activity, enabling multiplexed C to U and A to I editing through the use of tailored guide RNAs.

[1382] In summary, this example shows a programmable cytidine to uridine RNA editing with a directly evolved ADAR2 fused to CRISPR-Cas13 expands the RNA editing toolbox.

[1383] Applicants previously developed a RNA base editing technology called REPAIR (RNA editing for programmable A to I (G) replacement), which uses the RNA targeting CRISPR effector Cas13 (1-6) to direct the catalytic domain of ADAR2 to specific RNA transcripts to achieve adenine to inosine conversion with single-base precision (7). Technologies for precise RNA editing of cytidine to uridine would greatly expand the range of addressable disease mutations as well as allow for signaling pathway modulation in cells via alteration of post-translational modification sites (FIG. 107A).

[1384] Although natural enzymes capable of catalyzing C to U conversion have been harnessed for DNA base editing (16, 17), they only operate on single stranded substrates (18), exhibit off-targets across both the genome and transcriptome (19-21), and deaminate multiple bases within a window. In this example, Applicants took a synthetic approach to evolve the adenine deaminase domain of ADAR2 (ADAR2dd), which naturally acts on double-stranded RNA substrates and preferentially deaminates a target adenine mispaired with a cytidine, into a cytidine deaminase. Applicants fused this evolved cytidine deaminase to dCas13 to develop programmable RNA Editing for Specific C to U Exchange (RESCUE) in mammalian cells (FIG. 107B), which Applicants used to edit phosphorylation signaling of STAT and β-catenin proteins and modulate cell growth. Lastly, Applicants demonstrated multiplexed A to I and C to U base conversions with RESCUE and improved the specificity of RESCUE more than 10-fold via rational mutagenesis, generating a highly specific and precise C to U RNA editing tool.

[1385] Based on the comparison of the E. coli cytidine deaminase and the human ADAR2dd showed remarkable structural homology between their catalytic cores (22) (FIG. 107B), Applicants selected residues of ADAR2dd contacting the RNA substrate (23) for three rounds of rational mutagenesis on an ADAR2dd fused to the catalytically inactive Cas13b ortholog from Riemerella anatipestifer (dRanCas13b), yielding RESCUE round 3 (RESCUEr3), with 15% editing activity (FIGS. 103A-103B, 108, 109A-109B). Applicants then began directed evolution across ADAR2dd to identify additional candidate mutations that increase the activity of RESCUE in yeast.

[1386] Sixteen rounds of evolution, culminating with the final construct RESCUEr16 (hereafter referred to as just RESCUE), resulted in increased cytidine deamination activity across all motifs tested, with higher than 20% editing on 12 out of 16 possible motif combinations of the immediately neighboring 5′ and 3′ bases (FIG. 103C, 110, 111A-111C, 112, 113A-113E). Applicants additionally characterized guide features necessary for robust activity, finding that RESCUE was optimally active with C or U base-flips across the target base using a 30-nt guide (FIG. 103C, 114A-114C, 115). Moreover, as dRanCas13b and the catalytically inactive Cas13b ortholog from Prevotella sp. P5-125 (dPspCas13b) were equivalent, the final RESCUE construct used dRanCas13b (FIG. 116).

[1387] The 16 mutations in RESCUE are distributed throughout the structure of ADAR2dd (FIG. 117A), indicating both direct interactions of the evolved residues with the RNA target within the catalytic pocket as well as indirect effects (FIG. 117B). These mutations enabled fitting of either adenosine or cytidine, as RESCUE was capable of both adenosine and cytidine deamination (FIGS. 108A-108D). Applicants evaluated the role of each mutant by individually adding them to REPAIR or removing them from RESCUE. (FIGS. 119A-119D). Applicants found that mutations in the catalytic core (V351G, K350I) and contacting the RNA target (S486A, S495N) were important to RESCUE activity. Biochemical characterization of RESCUE mutations on purified ADAR2dd showed no activity on dsDNA, ssDNA, or DNA-RNA heteroduplexes, with the evolved mutations improving the kinetics of C to U editing on dsRNA substrates in vitro (FIGS. 120A-120D).

[1388] As ADAR2 has been employed in other RNA editing platforms without Cas13 (8, 9, 11, 13), Applicants assayed C to U activity in in the absence of a Cas13 fusion. Applicants introduced the RESCUE mutations into both ADAR2dd or the full-length ADAR2 protein in mammalian cells along with a guide RNA and assayed the ability of these constructs to restore luciferase activity, finding that the complete RESCUE construct, including the guide RNA direct repeat, was necessary for both adenosine and cytidine deamination activity (FIG. 103D, FIG. 121A-121D, 122A-122C, 123A-123C). To test C to U editing in alternative RNA editing systems, which rely on recruitment of MS2-ADAR2dd fusions (24) or full length ADAR2 recruitment with RNA guides (11, 24), Applicants introduced the RESCUE mutations into these constructs and found that editing efficiency was markedly reduced compared to Cas13b-based RESCUE (FIGS. 124A-124F).

[1389] Applicants next evaluated the efficiency of RESCUE on endogenous transcripts in HEK293FT cells via bulk sequencing of cell populations. Applicants tested a variety of guide designs across 24 different sites across nine genes as well as on 24 synthetic disease-relevant mutation targets from ClinVar and found editing rates up to 42% (FIG. 103E, FIGS. 125A-125C, 126A-126B, 127A-127B, 130; Table 28). Across the guides tested (Tables 29-31), Applicants found multiple guide design rules, most notably related to features of the motif (5′ U or A preferred) and guide mismatch position.

[1390] To demonstrate control of signaling pathways via RNA editing of post-translational modification sites, Applicants altered activation of the STAT and Wnt/β-catenin pathways via modulation of key phosphorylation residues (FIG. 104A, 129A-129F). Mutating phosphorylated residued on β-catenin, such as S33, S37, and T41, inhibited ubiquitination and degradation, allowing the protein to engage transcription factors like LEF and TCF1/2/3 and leading to increased cell proliferation (25) (FIG. 104B). Applicants tested a panel of guides targeting the β-catenin transcript (CTNNB1) at residues known to be phosphorylated and observed editing levels between 5% and 28% (FIG. 104C), resulting in up to 5-fold activation of Wnt/β-catenin signaling (FIG. 104D) and increased cell growth in HEK293FT (FIGS. 104E-104F) and human umbilical vein endothelial cells (HUVECs) (FIGS. 130A-130B). As therapeutic applications with RESCUE may benefit from shorter constructs for viral delivery, Applicants also evaluated RESCUE activity with C-terminal truncations of dRanCas13b and found either similar or improved deaminase activity (FIG. 131).

[1391] Since RESCUE retained adenosine deaminase activity (FIGS. 118A-118D), the native pre-crRNA processing activity of Cas13b (4) enabled multiplexed adenine and cytosine deamination. By delivering RESCUE along with a pre-crRNA targeting an adenine and a cytosine in the CTNNB1 transcript (FIG. 105A), Applicants found that RESCUE could edit both targeted residues S33F and T41A at rates of ˜15% and 5%, respectively (FIG. 105B). However, in these experiments, as well as single-plex assays, Applicants found A to I off-targets near the targeted cytosine (FIGS. 132A-132C, 133A-133D). To eliminate these off-targets, Applicants introduced disfavorable guanine mismatches in the guide across from off-target adenosines (FIG. 105C), significantly reducing off-target editing while minimally disrupting the on-target editing (FIG. 105D).

[1392] Applicants profiled off-targets with whole-transcriptome RNA-sequencing, finding that while RESCUE had ˜80% C to U editing on the Gluc transcript (FIG. 106A), it had 188 C to U off-targets and 1,695 A to I off-targets, comparable to A to I off-targeting with REPAIRv1 (7)(FIGS. 108A, 108B). To improve the specificity of RESCUE Applicants performed rational mutagenesis of ADAR2dd at residues interacting with the RNA target (FIG. 106C), resulting in multiple RESCUE mutants with reduced A to I off-target activity and high C to U on-target deamination activity, as measured by a luciferase reporter (FIG. 106D) and RNA sequencing (FIGS. 106E-106G). The top specificity mutant, S375A on RESCUE (hereafter referred to as RESCUE-S), maintained ˜76% on-target C to U editing (FIG. 106E), but only had 103 C to U off-targets and 139 A to I off-targets, an approximate 10-fold reduction in the number of adenine deamination off-targets (FIGS. 106E-106G), with diminished missense mutations and differentially-regulated transcripts (FIGS. 134A-134F, 135A-135C, 136A-136B, 137A-137D). Applicants also found that RESCUE-S retained similar C to U activity as RESCUE at many endogenous sites, even exceeding it at some sites (FIGS. 138A-138C, 139A-139C, 140A) with higher specificity within the local guide window (FIG. 138C, 140B-140E).

[1393] RESCUE was a programmable base editing tool capable of precise cytidine to uridine conversion in RNA. Using directed evolution, Applicants demonstrated that adenosine deaminases can be relaxed to accept other bases, resulting in a novel cytidine deamination mechanism that can edit dsRNA. While in the present study Applicants took advantage of the RNA-guided targeting mechanism of Cas13, other RNA targeting mechanisms (8-15, 24) can similarly be combined with evolved ADAR2dd mutants to achieve precise cytidine deamination on RNA transcripts. The larger targetable amino acid codon space of RESCUE's cytidine deamination activity enabled modulation of more post-translational modifications, such as phosphorylation, glycosylation, and methylation, as well as expanded targeting of common catalytic residues (FIGS. 107 and 141). Moreover, cytidine deaminase-mediated RNA editing allowed for additional targeting of disease-associated mutations and generation of protective alleles, such as ApoE2. Overall, RESCUE extended the RNA targeting toolkit with new base editing functionality, allowing for expanded modeling and potential treatment of genetic diseases.

### REFERENCES

[1394] 1. O. O. Abudayyeh et al., C2c2 is a single-component programmable RNA-guided RNA-targeting CRISPR effector. Science 353, aaf5573 (2016).
[1395] 2. C. Cassidy-Amstutz et al., Identification of a Minimal Peptide Tag for in Vivo and in Vitro Loading of Encapsulin. Biochemistry 55, 3461-3468 (2016).
[1396] 3. S. Shmakov et al., Discovery and Functional Characterization of Diverse Class 2 CRISPR-Cas Systems. Mol Cell 60, 385-397 (2015).
[1397] 4. A. A. Smargon et al., Cas13b Is a Type VI-B CRISPR-Associated RNA-Guided RNase Differentially Regulated by Accessory Proteins Csx27 and Csx28. Mol Cell 65, 618-630 e617 (2017).
[1398] 5. A. East-Seletsky et al., Two distinct RNase activities of CRISPR-C2c2 enable guide-RNA processing and RNA detection. Nature 538, 270-273 (2016).
[1399] 6. O. O. Abudayyeh et al., RNA targeting with CRISPR-Cas13. Nature 550, 280-284 (2017).
[1400] 7. D. B. T. Cox et al., RNA editing with CRISPR-Cas13. Science 358, 1019-1027 (2017).
[1401] 8. T. Merkle et al., Precise RNA editing by recruiting endogenous ADARs with antisense oligonucleotides. Nat Biotechnol 37, 133-138 (2019).
[1402] 9. P. Vogel et al., Efficient and precise editing of endogenous transcripts with SNAP-tagged ADARs. Nat Methods 15, 535-538 (2018).
[1403] 10. M. Fukuda et al., Construction of a guide-RNA for site-directed RNA mutagenesis utilizing intracellular A-to-I RNA editing. Sci Rep 7, 41478 (2017).
[1404] 11. J. Wettengel, P. Reautschnig, S. Geisler, P. J. Kahle, T. Stafforst, Harnessing human ADAR2 for RNA repair—Recoding a PINK1 mutation rescues mitophagy. Nucleic Acids Res 45, 2797-2808 (2017).
[1405] 12. M. F. Montiel-Gonzalez, I. C. Vallecillo-Viejo, J. J. Rosenthal, An efficient system for selectively altering genetic information within mRNAs. Nucleic Acids Res 44, e157 (2016).
[1406] 13. P. Vogel, M. F. Schneider, J. Wettengel, T. Stafforst, Improving site-directed RNA editing in vitro and in cell culture by chemical modification of the guideRNA. Angew Chem Int Ed Engl 53, 6267-6271 (2014).
[1407] 14. M. F. Montiel-Gonzalez, I. Vallecillo-Viejo, G. A. Yudowski, J. J. Rosenthal, Correction of mutations within the cystic fibrosis transmembrane conductance regulator by site-directed RNA editing. Proc Natl Acad Sci USA 110, 18285-18290 (2013).
[1408] 15. H. A. Rees, D. R. Liu, Base editing: precision chemistry on the genome and transcriptome of living cells. Nat Rev Genet 19, 770-788 (2018).
[1409] 16. A. C. Komor, Y. B. Kim, M. S. Packer, J. A. Zuris, D. R. Liu, Programmable editing of a target base in genomic DNA without double-stranded DNA cleavage. Nature 533, 420-424 (2016).
[1410] 17. K. Nishida et al., Targeted nucleotide editing using hybrid prokaryotic and vertebrate adaptive immune systems. Science 353, (2016).
[1411] 18. J. D. Salter, R. P. Bennett, H. C. Smith, The APOBEC Protein Family: United by Structure, Divergent in Function. Trends Biochem Sci 41, 578-594 (2016).
[1412] 19. S. Jin et al., Cytosine, but not adenine, base editors induce genome-wide off-target mutations in rice. Science, (2019).
[1413] 20. E. Zuo et al., Cytosine base editor generates substantial off-target single-nucleotide variants in mouse embryos. Science, (2019).
[1414] 21. J. Grunewald et al., Transcriptome-wide off-target RNA editing induced by CRISPR-guided DNA base editors. Nature, (2019).
[1415] 22. M. R. Macbeth et al., Inositol hexakisphosphate is bound in the ADAR2 core and required for RNA editing. Science 309, 1534-1539 (2005).
[1416] 23. M. M. Matthews et al., Structures of human ADAR2 bound to dsRNA reveal base-flipping mechanism and basis for site selectivity. Nature structural & molecular biology 23, 426-433 (2016).
[1417] 24. D. Katrekar et al., In vivo RNA editing of point mutations via RNA-guided adenosine deaminases. Nat Methods 16, 239-242 (2019).
[1418] 25. B. T. MacDonald, K. Tamai, X. He, Wnt/beta-catenin signaling: components, mechanisms, and diseases. Dev Cell 17, 9-26 (2009).
[1419] 26. M. K. Chee, S. B. Haase, New and Redesigned pRS Plasmid Shuttle Vectors for Genetic Manipulation of Saccharomyces cerevisiae. G3 (Bethesda) 2, 515-526 (2012).
[1420] 27. M. F. Laughery et al., New vectors for simple and streamlined CRISPR-Cas9 genome editing in Saccharomyces cerevisiae. Yeast 32, 711-720 (2015).
[1421] 28. M. R. Macbeth, B. L. Bass, Large-scale overexpression and purification of ADARs from Saccharomyces cerevisiae for biophysical and biochemical studies. Methods Enzymol 424, 319-310 (2007).
[1422] 29. H. Ng, N. Dean, Dramatic Improvement of CRISPR/Cas9 Editing in Candida albicans by Increased Single Guide RNA Expression. mSphere 2, (2017).
[1423] 30. R. Heim, D. C. Prasher, R. Y. Tsien, Wavelength mutations and posttranslational autoxidation of green fluorescent protein. Proc Natl Acad Sci USA 91, 12501-12504 (1994).
[1424] 31. Y. Wang, P. A. Beal, Probing RNA recognition by human ADAR2 using a high-throughput mutagenesis method. Nucleic Acids Res 44, 9872-9880 (2016).
[1425] 32. R. D. Gietz, R. H. Schiestl, Large-scale high-efficiency yeast transformation using the LiAc/SS carrier DNA/PEG method. Nat Protoc 2, 38-41 (2007).
[1426] 33. M. T. Veeman, D. C. Slusarski, A. Kaykas, S. H. Louie, R. T. Moon, Zebrafish prickle, a modulator of noncanonical Wnt/Fz signaling, regulates gastrulation movements. Curr Biol 13, 680-685 (2003).

[1427] Materials and Methods

[1428] Design and Cloning of Yeast Constructs

[1429] For expression of the dRanCas13b-hADAR2dd construct in yeast, the fusion protein was cloned downstream of a pGAL promoter in a pRSII426 backbone (26), by modifying pML104 (Addgene #67638) (27). To improve expression, a GS linker was cloned between the fusion proteins, and ADAR2dd was codon optimized for yeast (28). Additional codon mutations, corresponding to rounds of RESCUE, were introduced via Gibson Cloning.

[1430] Targeting plasmids for testing activity in yeast were engineered for both fluorescent screens (GFP) and auxotrophic selection screens (His). All targeting plasmids were cloned into the pYES3/CT backbone (Thermo Scientific). All plasmids contained a RanCas13b guide cassette for RESCUE, with expression driven by the ADH1 promoter, and spacer and DR sequences flanked by HH and HDV ribozymes (29). A construct with the spacer replaced by a golden gate site was cloned to facilitate modular guide cloning.

[1431] To generate a GFP indicator of C to U RNA editing activity, the Y66H green-to-blue mutation (30) was introduced into a yeast codon optimized EGFP (yeGFP) (31) driven by the TEF promoter. Successful C to U RNA editing restores the green fluorescence of this construct. His reporters for C to U editing were generated by testing conserved residues in HIS3 for loss of activity when mutated to residues that could be rescued by RNA editing (FIG. 128). Mutations that created inactive HIS3 were cloned into a HIS3 gene, under its native HIS3 promoter, in the pYES3/CT backbone.

[1432] All yeast plasmids are listed in Table 33, and all targeting guides used in yeast experiments are listed in Table 34.

[1433] RESCUE Directed Evolution

[1434] To select for C to U activity in yeast, Applicants engineered a set of yeast reporter assays based on either restoration of GFP fluorescence or prototrophic reversion of a HIS auxotrophic selection gene. Sequencing GFP positive cultures or colonies that survived in the absence of histidine elected individual mutations in the ADAR2dd domain, which were introduced onto the previous RESCUE candidate round and evaluated for activity in mammalian cells using various reporter constructs. After optimizing luciferase activity on the UCG luciferase site (C82R) for 11 rounds, Applicants switched to optimizing at the T41 site on the CTNNB1 transcript for two rounds and then the CCU site (L77P) on the Gluc transcript for another two rounds. In the final round, Applicants tested for restoration of activity of luciferase mutants with all four possible 5′ bases at the Gluc C82R site (UCG, ACG, CCG, and GCG) and two additional motifs (CCU and CCA) at the Gluc L77P mutation, finding increases in activity with these motifs (FIG. 103B, FIG. 110). To further validation our RESCUEr versions from the directed evolution pipeline in our yeast system, Applicants tested multiple RESCUEr iterations for both activity in yeast and in vitro assays (FIGS. 113A-113E and 120A-120D). Testing both EGFP and His restoration in yeast, Applicants found that later versions of RESCUEr could more effectively perform C to U editing on both targets (FIGS. 113A-113E). After each round of yeast screening, top mutations were evaluated on a series of mammalian reporters to validate activity and select the top mutant for the next round of yeast screening. All screens and resulting mutations are listed in Table 27.

[1435] Generation of Mutagenesis Libraries for Yeast Screening

[1436] To generate mutagenesis libraries for screening mutations in yeast systems, the hADAR2 deaminase domain was mutated using Genemorph II (Agilent Technologies) for error-prone PCR across eight 50 mL reactions ranging in template input from 74 ng-9.4 μg via a two-fold dilution series. Following amplification, reactions were pooled, diluted 1:4 in DI water and loaded into a 2% gel containing ethidium bromide. Extracted samples were purified using a MinElute PCR Purification Kit (Qiagen) before treatment with Dpn1 (Thermo Fisher Scientific) at 37° C. for 2h to remove residual template plasmid and subsequent gel and MinElute purification. The backbone for cloning was generated by digesting 7 μg of template plasmid with KflI, RruI, and Eco72I (Thermo Fisher Scientific) for 1 hour. The digest was gel purified with the MinElute PCR Purification kit and eluted in 30 μL of pre-warmed water.

[1437] The purified PCR insert and digested backbone were assembled using Gibson Assembly (New England Biosciences), with 456 ng of PCR insert and 800 ng of backbone digest incubated in an 80 μL reaction for 1 hour. The product was pelleted with isopropanol precipitation and resuspended in 12 μL of Tris-EDTA buffer via heating to 50° C. for 5 minutes. 50 μL of Endura Electrocompetent cells (Lucigen) were thawed on ice for 10 minutes and 2 μL of resuspended Gibson product was added. The mixture was electroporated using a GenePulser Xcell (Bio-Rad) following optimal Endura settings (1.0 mm cuvette, 10 μF, 600 Ohm, 1800 V). Samples from each electroporation were recovered in 1 mL of Recovery Media (Lucigen) and incubated at 37° C. for 1 hour while shaking at 300 r.p.m. Two electroporations were performed per mutagenesis library. The recovered culture was plated on a large pre-warmed 100 μg/mL ampicillin plate, and plates were incubated at 37° C. for 16 hours before harvesting with the Nucleobond Xtra Maxi Kit (Macherey-Nagel).

[1438] Transformation of Mutagenesis Libraries in Yeast

[1439] All yeast experiments were performed using INVSc1 (ThermoFisher Scientific). Large scale yeast transformation was carried out as previously described (32). Briefly, colonies containing the Y66H EGFP or HIS3 reporter plasmids were picked into 300 mL -Trp 2% glucose selection media and grown up overnight at 30° C. After growth, the OD600 of the cells were determined and 2.5e9 cells were added to 500 mL of pre-warmed 2×YPAD and incubated for 4 hours at 30° C. The cell pellet was washed multiple times and then resuspended in 36 mL of transformation mix containing 24 mL of PEG 3350 (50% w/v), 3.6 mL of 1.0 M Lithium acetate, 5 mL of denatured single-stranded carrier salmon sperm DNA at 2.0 mg/mL (ThermoFisher Scientific), 2.9 mL of water, and 500 μL of 1 μg/μL plasmid library. After incubation at 42° C. for 60 minutes, the cell pellet was resuspended in 750 mL of -Ura/-Trp 2% glucose selection media and grown overnight until the culture reached OD600 of 5-6. At that point, 6 mL of the culture was seeded into 250 mL of 2% raffinose -Ura/-Trp selection media and incubated until the OD600 was 0.5-1. Cultures were induced by adding 27 mL of 30% galactose and incubated overnight at 30° C. for 12-14 hours. Cells were then either subjected to cell sorting or plating on selection plates, as described below. Any validation experiments involving single mutants were transformed in a similar way, but using a scaled down version of the large-scale transformation above.

[1440] Fluorescent Cell Sorting of Yeast Libraries

[1441] After induction, cells were sorted on a SH800S Cell Sorter by gating for EGFP fluorescence compared to a negative non-induced and non-targeting guide control. After 100 million cells had been sorted into 2% glucose -Ura/-Trp selection media, sorted cells were incubated overnight and then diluted 1:40 into 2% raffinose -Ura/-Trp selection media at an OD600 of 5-6. Cells were returned to the shaker, induced with galactose at an OD600 between 0.5-1, and incubated overnight for 12-14 hours before sorting again. Sorting was performed until 10-20 million cells had been sorted. Iterative growth and sorting was repeated 2-3 additional times, with each iteration of sorted cells harvested for plasmid with Zymoprep Yeast Plasmid Miniprep II (Zymo). The Adar2dd region of the plasmid was PCR amplified and sequenced by Ilumina NextSeq NGS to ascertain the mutants present at each round of selection. Top enriched mutants were individually ordered and cloned for mammalian validation testing as described below.

[1442] His Growth Selection of Yeast Libraries

[1443] After induction, the cell library was plated on 2% raffinose/3% galactose -Ura/-Trp/-His selection plates. As colonies grew, they were picked into water and streaked on 2% raffinose/3% galactose -Ura/-Trp/-His selection plates. After overnight growth of the streaks, colony PCR was performed on each streak and subjected to sanger sequencing of the ADAR2 catalytic domain as well as the His gene to check for recombination and DNA mutagenesis. Mutations were individually ordered and cloned for mammalian validation testing as described below.

[1444] Design and Cloning of Mammalian Constructs for RNA Editing

[1445] RanCas13b was made catalytically inactive (dRanCas13b) via histidine to alanine and arginine to alanine mutations (R142A/H147A/R1039A/H1044A) at the catalytic site of the HEPN domains. The deaminase domain and ADAR2 were synthesized and PCR amplified for Gibson cloning into pcDNA-CMV vector backbones and were fused to dRanCas13b at the C-terminus via a GS-mapkNES-GS (GSSLQKKLEELELGS (SEQ ID NO:779)) linker. Mutations in the ADAR2 deaminase domain for altering cytosine deamination activity or specificity were introduced by Gibson cloning into the dRanCas13b-GS-mapkNES-GS-ADAR2dd backbone. All mutations introduced into ADAR2dd for evolving C to U editing are listed in Table 27.

[1446] For comparison between different Cas13b orthologs, mutations tested on the dRanCas13b backbone were transferred to a dPspCas13b fusion vector by Gibson cloning onto the REPAIR construct (7), dPspCas13b-GS-HIVNES-GS-ADAR2dd. For testing the ADAR2dd alone without dRanCas13b and the full length ADAR2, Applicants used Gibson cloning to add all mutations to pcDNA-CMV vector backbones with ADAR2dd or full length ADAR2, previously cloned to test REPAIR (7). Luciferase reporter vectors for measuring C to U RNA editing activity were generated by screening potential mutations in Gluc in the previously reported luciferase reporter plasmid (7). This reporter vector expresses functional Cluc as a normalization control, but a defective Gluc due to the addition of mutants (either C82R or L77P). To test RESCUE editing motif preferences, Applicants cloned every possible motif around the cytosine at codon 82 (AAX CXC) of Gluc. Mutants were evaluated for C to U editing of C82R and restoration of catalytic activity (33). As the surrounding motif strongly determines RNA editing efficiency for A to I editing (7), Applicants initially targeted a UCG site since a 5′U and 3′G are the preferred flanking bases for ADAR2dd optimal activity. Secreted luciferase reporter vectors for testing CTNNB1 editing efficiency were generated from M50 Super 8× TOPFlash (Addgene #12456) and M50 Super 8× FOPFlash (Addgene #12457) (34). The original firefly luciferase, under control of either TCF/LEF responsive elements (TOPFlash) or mock binding sites (FOPFlash) was replaced with a secreted Gaussia luciferase via Gibson cloning. An additional Cypridina luciferase with expression drive by a CMV promoter was cloned in to serve as a transfection control. All mammalian plasmids are listed in Table 32.

[1447] Selection of Candidate Rounds in Mammalian Cells

[1448] Mutations that performed comparable or better to the existing candidate round were selected for screening on the entire panel of 6 luciferase reporters. For the selection of RESCUEr4 through RESCUEr10, candidate mutations were initially screened on TCG motifs; candidate round RESCUEr11 was isolated using GCG motifs as the initial screening. Selection of candidate rounds RESCUEr12 through RESCUEr14 were validated in mammalian cells using an initial screening on editing of the T41I residue of endogenous CTNNB1, resulting in β-catenin pathway activation that was profiled with luminescent reporters of pathway activity, and candidate rounds RESCUEr15 and RESCUEr16 were selected via activity on the L77P CCT motif of Gluc. All rounds and yeast screens used to generate them are listed in Table 27.

[1449] Cloning Pathogenic U>C Mutations for Assaying RESCUE Activity

[1450] To generate disease-relevant mutations for testing REPAIR activity, 23 U>C mutations related to disease pathogenesis, as defined in ClinVar, were selected (grouped as a panel of 22 genes and ApoE independently). Selected targets were ordered from Integrated DNA Technologies as 200-bp regions surrounding the mutation site, and were cloned downstream of mScarlet under a Eflalpha promoter.

[1451] Guide Cloning for RESCUE

[1452] For expression of mammalian guide RNAs for RESCUE, a previously described construct (7) with a RanCas13b direct repeat sequence preceded by golden-gate acceptor sites under U6 expression was used. Individual guides were cloned into this expression backbone by golden-gate cloning. To determine optimal guides for select sites, both C and U flips were tested, as well as tiling guides around the most common optimal guide range (mismatch distance of ˜24). Guide sequences for RESCUE experiments are listed in Tables 29-31.

[1453] Mammalian Cell Culture

[1454] Unless otherwise stated, mammalian cell culture experiments were performed in the HEK293FT line (American Type Culture Collection (ATCC)), grown in Dulbecco's Modified Eagle Medium containing glucose, sodium pyruvate, and GlutaMAX (Thermo Fisher Scientific), and supplemented with 1× penicillin-streptomycin (Thermo Fisher Scientific) and 10% fetal bovine serum (VWR Seradigm). Cells were maintained at confluency below 80%.

[1455] Unless otherwise noted, all transfections were performed with Lipofectamine 2000 (Thermo Fisher Scientific) in 96-well plates coated with poly-D-lysine (BD Biocoat). Cells were plated at approximately 20,000 cells/well 16 hours prior to transfection to ensure 90% confluency at the time of transfection. For each well on the plate, transfection plasmids were combined with Opti-MEM I Reduced Serum Medium (Thermo Fisher Scientific) to a total of 25 μl. Separately, 24.5 μl of Opti-MEM was combined with 0.5 μl of Lipofectamine 2000. Plasmid and Lipofectamine solutions were then combined and incubated for 5 minutes, after which they were pipetted onto cells.

[1456] HUVEC cells (Lonza) were cultured in Endothelial Growth Media-2 (Lonza) on Nunc Collagen I Coated EasYFlasks (Thermo Fisher Scientific). Cells were maintained at confluency below 80%. HUVEC transfections were performed with Lipofectamine LTX (Thermo Fisher Scientific) in 96-well plates coated with Collagen I (BD Biocoat). Cells were plated at approximately 5,000 cells/well 16 hours prior to transfection. Culture media was replaced with fresh EGM-2 immediately before transfection. For each well on the plate, transfection plasmids were combined with 1 μL Plus reagent and Opti-MEM to a total of 25 μL. Separately, 24.7 μL of Opti-MEM was combined with 0.3 μL of Lipofectamine LTX. Plasmid and LTX solutions were then combined and incubated for 25 minutes, after which they were pipetted onto cells. After 4 hours, cells were washed with PBS and media was replaced with fresh EGM-2.

[1457] RESCUE Editing in Mammalian Cells

[1458] To assess RESCUE activity in mammalian cells, Applicants transfected 150 ng of RESCUE vector, 300 ng of guide expression plasmid, and, when using a reporter (either luciferase, STAT activity, or β-catenin activity), 40 ng of the RNA editing reporter. After 48 hours, RNA from cells was harvested and reverse transcribed using a method previously described (33) with a gene specific reverse transcription primer. The extracted cDNA was then subjected to two rounds of PCR to add Illumina adaptors and sample barcodes using NEBNext High-Fidelity 2×PCR Master Mix (New England Biolabs). The library was then subjected to next generation sequencing on an Illumina NextSeq or MiSeq. RNA editing rates were then evaluated at all adenosines within the sequencing window.

[1459] In experiments where the luciferase reporter was targeted for RNA editing, Applicants also harvested the media with secreted luciferase prior to RNA harvest. Applicants measured luciferase activity with Cypridinia and Gaussia luciferase assay kits (Targeting Systems) on a plate reader (Biotek Synergy Neo2) with an injection protocol. All replicates performed are biological replicates.

[1460] In experiments where the input amount of RESCUE plasmid was varied, total plasmid amount was kept constant by replacing RESCUE expression plasmid with a filler plasmid expressing a CMV-driven mScarlet, except where noted. In the experiment where input amount of guide plasmid was varied, total plasmid amount was either kept constant (“with filler plasmid”) via substitution of non-targeting guide, or not kept constant (“without filler plasmid”); in this experiment, there was no filler plasmid for the RESCUE plasmid.

[1461] Considerations for RESCUE Guide Design

[1462] Applicants tested a panel of guide RNAs with varying mismatch positions targeting 24 different sites across nine genes (FIGS. 103E, 125A-125C), specifically choosing varying 5′ base identities to interrogate the deamination activity on different motifs. Applicants found that RESCUE achieved editing rates up to 35% at all sites tested, and that the ideal mismatch position or base-flip (C or U) was site dependent. Moreover, RESCUE outperformed all previous rounds of mutants on multiple endogenous sites and required less transfected plasmid than earlier versions (FIGS. 126A-126B). To better evaluate the relevance of RESCUE for therapeutics, Applicants designed a series of 24 targets to model editing of disease-relevant mutations from ClinVar (see Table 28), and found editing rates up to 42% as measured by bulk sequencing (FIGS. 129A-129B), including the Alzheimer's risk related ApoE4 allele (FIG. 128).

[1463] After analyzing all guides in the paper, Applicants found that the optimal guide design differs between target sites. Applicants recommend testing a variety of guide designs per new target site including both C and U flips as well as varying mismatch positions. An example of designs to test would include a 30 nt guide with C or U flip and mismatches in the following positions: 28, 26, 24, 22, and 20. Overall, Applicants find that any cytidine site that is flanked by a U or A will have robust editing activity. Sites with a 5′ C or G will be edited with less efficiency.

[1464] Biochemical Characterization of RESCUE Mutations on ADAR2dd

[1465] To assess kinetic activity of hADAR2 deaminase domain containing RESCUE mutations, multiple iterations were cloned into a pGAL-His6-TwinStrep-SUMO-hADAR2dd backbone containing the URA3 gene. The plasmids were transformed into BCY123 competent yeast cells (10). Briefly, frozen cells were thawed in 37° C. water bath for 15-30 seconds. 10 μL of cells per condition were centrifuged at 13,000 g in a microcentrifuge for 2 minutes and supernatant was removed. The prepared transformation mix for each construct contained 260 μL PEG 3350 prepared at 50% w/v, 50 μL of denatured salmon sperm (Thermo Fisher Scientific), 36 μL 1M Lithium Acetate, and 750 ng of plasmid in 14 μL of DI H2O. The yeast pellet was resuspended with the transformation mix and incubated in a 42° C. water bath for 30 minutes before centrifugation at 13,000 g for 30 seconds and subsequent supernatant removal. The pellet was then resuspended in 1 mL of DI H2O and 50 μL was taken into 1 mL of DI H2O for mixing. Subsequently, 200 μL was plated onto minimal glucose plates minus uracil for prototrophic selection.

[1466] Plates were incubated at 30° C. for 48 hr before seeding single colonies into 10 mL cultures of yeast minimal media supplemented with dextrose (20 g/L). Minimal media was prepared with yeast dropout supplement Y2001 (1.39 g/L), yeast nitrogen base without amino acids (6.7 g/L), adenine hemisulfate (0.022 g/L), histidine (0.076 g/L), leucine (0.38 g/L), and tryptophan (0.076 g/L). Cultures were grown overnight before seeding the entire 10 mL culture into a 100 mL minimal media/dextrose culture. Following 8 hours of growth, each construct was seeded into two 2 L flasks containing 1 L of minimal media supplemented with 20 g of raffinose (VWR). These were grown overnight and induced by the addition of 30 g of galactose dissolved in 200 mL of minimal media; cultures were then grown for an additional eight hours before harvesting. Cultures were spun down in a Beckman Coulter Avanti J-E centrifuge at 5,000 RPM for 20 minutes, the resulting pellets were stored at −80° C.

[1467] Protein purification of the different RESCUE candidate hADAR2 deaminase domains was modified from the protocol described in Macbeth and Bass (28). In brief, 5-10 g of frozen yeast pellet was resuspended in 50 mL lysis buffer Lysis buffer (20 mM TrisHCl pH 8, 5% glycerol, 750 mM NaCl, 1 mM beta-mercaptoethanol, 0.01% Triton-X) supplemented with one tablet of EDTA-free mini cOmplete ULTRA protease inhibitors (Sigma). The suspension was passed seven times through a LM20 microfluidizer at 25,000 psi, and the cell debris was pelleted by centrifugation at 9,500 RPM for 80 minutes. The cleared lysate was decanted off and incubated with 1 mL of StrepTactin superflow resin (Qiagen) for 2.5 hours, gently shaking using a rotary shaker at 4° C. The suspension was added to an Econo-column chromatography column pre-equilibrated with lysis buffer, and the resin was washed with 40 mL of lysis buffer. Three subsequent washes (40 mL each) lowered the salt concentration (500 mM, 250 mM, then 100 mM NaCl). Protein was cleaved off the resin by gently shaking overnight on a table shaker in 20 mL of lysis buffer supplemented with 100 μg of SUMO protease (in-house). Flow-through was collected and combined with 3×5 mL washes of the resin with lysis buffer. The entire fraction containing cleaved protein was loaded onto a 5 mL Heparin HP cation exchange column (GE Healthcare Life Sciences), and eluted over a NaCl gradient from 100 mM to 1 M (buffers 20 mM Tris-HCl pH 8, 5% glycerol, 1 mM beta-mercaptoethanol with respective NaCl concentration). Fractions were checked for purity and analyzed using SDS-PAGE and Coomassie staining, and protein containing fractions were pooled and concentrated using 10 MWCO centrifugal filters (Amicon). The concentration in mg/mL of each protein was determined by Coomassie staining and SDS-PAGE electrophoresis against a serial dilution of BSA (starting at 1 mg/mL). Bands were quantified using ImageLab software (BioRad Image Lab Software 6.0.1), and the concentration was estimated by interpolation of a linear regression of the BSA standard.

[1468] ssRNA and DNA oligonucleotides with DNA handles (Integrated DNA Technologies) were annealed in 1× duplex buffer (HEPES 30 mM pH 7.5, K+Acetate 100 mM) at 85° C. for 5 minutes with a slow ramp to 4° C., then purified using Oligo Clean & Concentrator (Zymo), quantified with a Nanodrop, and normalized to 100 ng/μL.

[1469] In vitro assays were performed as previously described (23) with slight modifications. Assays were set up on ice with 25 nM RNA substrate, 50 nM ADAR protein, and 0.16 U/uL RNase inhibitor, and 15.6 mM NaCl in 1× assay buffer (17 mM TrisHCl pH 7.5, 5% glycerol, 1.6 mM EDTA, 0.003% NP-40, 0.5 mM TCEP). 20 μL reactions (with three technical replicates) were incubated at 30° C. for a range of timepoints (0, 5, 10, 30, and 60 minutes). Reactions were quenched by the addition of 10 uL of 0.5% SDS solution (to a total concentration of 0.166% SDS), and denatured for 5 minutes at 95° C.

[1470] RNA was purified from the reaction mixture using RNA XP clean beads (Beckman Coulter) with 10:3 and 3:1 ratios of magnetic beads and isopropanol to sample volume, respectively. Purified RNA was reverse transcribed using the qScript Flex cDNA kit according to manufacturer specifications with modifications. Specifically, 12.85 μL of purified RNA was combined with 2 μL of GSP enhancer and 0.15 μL of 100 μM RT primer, mixed by vortexing and incubated at 65° C. for 5 minutes before entering a 42° C. hold. At this point 4 μL of qScript flex reaction mastermix (5×) and 1 μL of qScript RT were added to each reaction and mixed by pipetting followed by a one hour incubation at 42° C., then heating at 85° C. for 5 minutes. The cDNA was prepared for sequencing with two rounds of PCR amplification to add Illumina adaptors and barcodes and was sequenced on an Illumina NextSeq. Rates of in vitro RNA editing were determined at all cytidines (for C-to-U activity) and adenosines (for A-to-I activity) within the sequencing window.

[1471] Whole-Transcriptome Sequencing to Evaluate ADAR Editing Specificity

[1472] For analyzing off-target RNA editing sites across the transcriptome, total RNA from cells was harvested 48 hours post-transfection using the RNeasy Plus Miniprep kit (Qiagen). The mRNA fraction was then enriched using a NEBNext Poly(A) mRNA Magnetic Isolation Module (NEB) and this RNA was then prepared for sequencing using an NEBNext Ultra RNA Library

[1473] Prep Kit for Illumina (NEB). The libraries were then sequenced on an Illumina NextSeq and loaded such that there were at least 5 million reads per sample.

[1474] RNA Editing Analysis for Targeted and Transcriptome-Wide Experiments

[1475] Analysis of the transcriptome-wide editing RNA sequencing data was performed on the FireCloud computational framework (software.broadinstitute.org/firecloud/) using a custom workflow developed for this publication: portal.firecloud.org/#methods/m/rna_editing_final_workflow/rna_editing_final_workflow/l.

[1476] For analysis, unless otherwise denoted, sequence files were randomly down sampled to 5 million reads. An index was generated using the RefSeq GRCh38 assembly with Gluc and Cluc sequences added, and reads were aligned and quantified using Bowtie/RSEM version 1.3.0. Alignment BAMs were then sorted and analyzed for RNA editing sites using REDitools (35, 36) with the following parameters: -t 8 -e -d -l -U [AG or TC or CT or GA]-p -u -m20 -T6-0 -W -v l-n 0.0. Any significant edits found in untransfected or EGFP-transfected conditions were considered to be SNPs or artifacts of the transfection and filtered out from the analysis of off-targets. Off-targets were considered significant if the Fisher's exact test yielded a p-value less than 0.05 after multiple hypothesis correction by Benjamini Hochberg correction and at least 2 of 3 biological replicates identified the edit site. Overlap of edits between samples was calculated relative to the maximum possible overlap, equivalent to the fewer number of edits between the two samples. The percentage of overlapping edit sites was calculated as the number of shared edit sites divided by minimum number of edits of the two samples, multiplied by 100. An additional layer of filtering for known SNP positions was performed using the Kaviar (37) method for identifying SNPs.

[1477] Differential Gene Expression Analysis of RNA Editing

[1478] Bowtie index was created based on the human hg38 UCSC genome and RefSeq transcriptome. Next, RSEM v1.3.157 was run with command line options “--estimate-rspd --bowtie-chunkmbs 512 --paired-end” to align paired-end reads directly to this index using Bowtie and estimate expression levels in transcripts per million (TPM) based on the alignments. For analysis of transcriptome changes, transcripts were considered detected if the average TPM of either the RESCUE or GFP control conditions was greater than 1. The Student's t-test was performed to identify differentially expressed isoforms that had p-value pass 0.01 FDR correction.

[1479] Stat Phenotype Assay

[1480] Cells were transfected with RESCUE plasmids, guide plasmids targeting residues on STAT3 and STAT1, and a luciferase reporter for STAT3 (Qiagen Cignal STAT3 Reporter) and STAT1 signaling (Qiagen Cignal GAS Reporter) using lipofectamine 2000, as described above and incubated for 48 hours. After 48 hours, the Dual-Glo Luciferase Assay (Promega) was used to measure firefly and renilla luciferase activity in the cells. The firefly signal was normalized to the renilla signal to measure the relative activation of STAT3 and STAT1.

[1481] β-Catenin Phenotype Assay

[1482] Cells were plated 24 hours prior to transfection in cell migration plates containing cores that prevent cell growth in the center of the well. After 24 hours, cells were transfected with RESCUE plasmids, guide plasmids targeting residues on β-catenin, and a luciferase reporter for β-catenin activation (Qiagen TCF/LEF Cignal Reporter) using lipofectamine 2000, as described above and incubated. After 24 hours, central cores were removed to allow for cell growth towards the center of the well. After another 24 hours of incubation, media was assayed for Gluc and Cluc luciferase signal. The relative ratio of Gluc to Cluc was calculated to determine the relative β-catenin activation between conditions. On day 3 cells were incubated for 10 minutes with CellTracker Green CMFDA Dye (ThermoFisher Scientific) and then washed with media. Cells were imaged daily using fluorescence to measure cell growth. Cell growth into the central area of the well was measured using ImageJ software by calculating the total area of fluorescence in the central growth region. Images were processed using an automated macro with the following commands:

[1483] //ImageJ macro for calculating cellular area run(“8-bit”);

[1484] run(“Auto Local Threshold”, “method=Bernsen radius=15 parameter 1=0 parameter 2=0 white”);

[1485] setAutoThreshold(“Default dark”); run(“Measure”);

[1486] Catenin Migration Assay (HUVECs)

[1487] HUVECs were plated on Collagen I-coated cell migration plates 16 hours prior to transfection. 100 ng of a single vector, containing both the RESCUE construct and guide, were used in the transfection protocol described above. After 24 hours, central cores were removed and media was replaced with Endothelial Basal Media-2 (Lonza) supplemented with hydrocortisone, hFGF-B, FBS, ascorbic acid, GA-1000, and heparin from EGM-2 Supplement Pack (Lonza). On day 3, cells were incubated for 10 minutes with CellTracker Green CMFDA Dye diluted in EBM-2 and then washed with media. Cells were imaged daily using fluorescence. Cell growth was measured using ImageJ software by manually outlining and quantifying the cell-free area in each well.

TABLE 27
RESCUE evolution table

| | | Screening | |
|---|---|---|---|
| | | method for | |
| RESCUE | | generation | |
| candidate | | of candidate | Mammalian |
| round | Mutations | mutations | editing target |
| r0 | ADAR2 + E488Q | Hyper active | N/A |
| (REPAIR) | | variant from | |
| | | Kuttan and | |
| | | Bass | |
| r1 | r0 + V351G | Rational | CCG site on |
| | | mutagenesis | Gluc transcript |
| | | | (C82R) |
| r2 | r1 + S486A | Rational | CCG site on |
| | | mutagenesis | Gluc transcript |
| | | | (C82R) |
| r3 | r2 + T375S | Rational | CCG site on |
| | | mutagenesis | Gluc transcript |
| | | | (C82R) |
| r4 | r3 + S370C | Y66H EGFP | CCG site on |
| | | | Gluc transcript |
| | | | (C82R) |
| r5 | r4 + P462A | P196L HIS | CCG site on |
| | | | Gluc transcript |
| | | | (C82R) |
| r6 | r5 + N597I | P196L HIS | CCG site on |
| | | | Gluc transcript |
| | | | (C82R) |
| r7 | r6 + L332I | P196L HIS | CCG site on |
| | | | Gluc transcript |
| | | | (C82R) |
| r8 | r7 + I398V | P196L HIS | CCG site on |
| | | | Gluc transcript |
| | | | (C82R) |
| r9 | r8 + K350I | P196L HIS | CCG site on |
| | | | Gluc transcript |
| | | | (C82R) |
| r10 | r9 + M383L | P196L HIS | CCG site on |
| | | | Gluc transcript |
| | | | (C82R) |
| r11 | r10 + D619G | S22P HIS | CCG site on |
| | | | Gluc transcript |
| | | | (C82R) |
| r12 | r11 + S582T | S22P HIS | T41I on |
| | | | endogenous |
| | | | β-catenin |
| r13 | r12 + V440I | S22P HIS | T41I on |
| | | | endogenous |
| | | | β-catenin |
| r14 | r13 + S495N | P196L HIS | CCT site on |
| | | | Gluc transcript |
| | | | (L77P) |
| r15 | r14 + K418E | P196L HIS | CCT site on |
| | | | Gluc transcript |
| | | | (L77P) |
| r16 | r15 + S661T | S22P HIS | UCG, ACG, |
| (RESCUE) | | | GCG, CGC |
| | | | sites on |
| | | | Gluc transcript |
| | | | (C82R), CCT and |
| | | | CCA sites on |
| | | | Gluc transcript |
| | | | (L77P), and T41I |
| | | | on endogenous |
| | | | β-catenin |

TABLE 28
Disease information for disease-relevant mutations

| Candidate | Gene | Diseases |
|---|---|---|
| NM_000071.2(CBS): | CBS | Thoracic aortic aneurysm |
| c.325T > C (p.Cys109Arg) | | and aortic dissection |
| NM_000141.4(FGFR2): | FGFR2 | Pfeiffer syndrome/Crouzon |
| c.799T > C (p.Ser267Pro) | | syndrome/Neoplasm of |
| | | stomach |
| NM_000551.3(VHL): | VHL | Von Hippel-Lindau syndrome |
| c.473T > C (p.Leu158Pro) | | |
| NM_002474.2(MYH11): | MYH11 | Aortic aneurysm, familial |
| c.3791T > C | | thoracic 4/Thoracic aortic |
| (p.Leu1264Pro) | | aneurysm and aortic |
| | | dissection |
| NM_000018.3(ACADVL): | ACADVL | Very long chain acyl-CoA |
| c.848T > C (p.Val283Ala) | | dehydrogenase deficiency |
| NM_002397.4(MEF2C): | MEF2C | Mental retardation, |
| c.2T > C (p.Met1Thr) | | stereotypic movements, |
| | | epilepsy, and/or cerebral |
| | | malformations |
| NM_002834.4(PTPN11): | PTPN11 | Noonan syndrome |
| c.853T > C (p.Phe285Leu) | | |
| NM_005609.3(PYGM): | PYGM | Glycogen storage disease, |
| c.2392T > C (p.Trp798Arg) | | type V |
| NM_001256850.1(TTN): | TTN | Limb-girdle muscular |
| c.90211T > C | | dystrophy, type 2J/Distal |
| (p.Cys30071Arg) | | myopathy Markesbery-Griggs |
| | | type/Hereditary myopathy with |
| | | early respiratory failure/ |
| | | Myopathy, early-onset, with |
| | | fatal cardiomyopathy/Familial |
| | | hypertrophic cardiomyopathy 9 |
| NM_005633.3(SOS1): | SOS1 | Noonan syndrome 4/Noonan |
| c.806T > C (p.Met269Thr) | | syndrome |
| NM_015559.2(SETBP1): | SETBP1 | Schinzel-Giedion syndrome |
| c.2612T > C (p.Ile871Thr) | | |
| NM_004572.3(PKP2): | PKP2 | Arrhythmogenic right |
| c.2386T > C | | ventricular cardiomyopathy, |
| (p.Cys796Arg) | | type 9 |
| NM_000138.4(FBN1): | FBN1 | Marfan syndrome |
| c.4222T > C | | |
| (p.Cys1408Arg) | | |
| NM_000375.2(UROS): | UROS | Congenital erythropoietic |
| c.217T > C (p.Cys73Arg) | | porphyria |
| NM_O14139.2(SCN11A): | SCN11A | not provided/Neuropathy, |
| c.1187T > C (p.Leu396Pro) | | hereditary sensory and |
| | | autonomic, type VII |
| NM_000152.4(GAA): | GAA | Glycogen storage disease, |
| c.1655T > C (p.Leu552Pro) | | type II |
| NM_020630.4(RET): | RET | Multiple endocrine neoplasia, |
| c.1858T > C | | type 2a/Multiple endocrine |
| (p.Cys620Arg) | | neoplasia, type 2/MEN2A |
| | | and FMTC |
| NM_000016.5(ACADM): | ACADM | Medium-chain acyl-coenzyme A |
| c.199T > C (p.Tyr67His) | | dehydrogenase deficiency |
| NM_014874.3(MFN2): | MFN2 | Charcot-Marie-Tooth disease, |
| c.227T > C (p.Leu76Pro) | | type 2A2A |
| NM_000341.3(SLC3A1): | SLC3A1 | Cystinuria |
| c.1400T > C | | |
| (p.Met467Thr) | | |
| NM_000431.3 (MVK): | MVK | Mevalonic aciduria/Hyper- |
| c.803T > C (p.Ile268Thr) | | immunoglobulin D with periodic |
| | | fever |
| NM_004004.5(GJB2): | GJB2 | Deafness, autosomal recessive |
| c.229T > C (p.Trp77Arg) | | 1A/Deafness, autosomal |
| | | dominant 3a/Nonsyndromic |
| | | hearing loss and deafness |
| NM_000041.4(APOE): | APOE | Alzheimer disease 2 |
| c.388T > C (p.Cys130Arg) | | |
| NM_000041.4(APOE): | APOE | Alzheimer disease 2 |
| c.595T > C (p.Cys176Arg) | | |

TABLE 29
Guide sequences used for luciferase editing

| | | | | | | | | Editing | |
|---|---|---|---|---|---|---|---|---|---|
| | Targeted | REPAIR/ | | Base flip/ | Codon | | | percentage | |
| Name | gene | RESCUE | Motif | position | change | Spacer sequence | Notes | (first figure) | First figure |
| UCG targeting | Gluc | RESCUE | UCG | C/30/26 | C82R | gugcCauugaugugggacaggca | No 5′ G | 67.493 | 103B |
| guide | | | | | | gaucaga (SEQ ID NO: 780) | | | |
| GCG targeting | Gluc | RESCUE | GCG | U/30/20 | C82R | guugggcgugcucuugauguggg | | 45.475 | 103B |
| guide | | | | | | acaggcag (SEQ ID NO: 781) | | | |
| ACG targeting | Gluc | RESCUE | ACG | C/30/28 | C82R | ggccuuugaugugggacaggcag | | 64.464 | 103B |
| guide | | | | | | aucagaca (SEQ ID NO: 782) | | | |
| CCG targeting | Gluc | RESCUE | CCG | C/30/26 | C82R | gugccguugaugugggacaggca | No 5′ G | 62.947 | 103B |
| guide | | | | | | gaucaga (SEQ ID NO: 783) | | | |
| CCU targeting | Gluc | RESCUE | CCU | C/30/26 | L77P | gggaacggcagaucagacagccc | | 3.800 | 103B |
| | | | | | | cuggugca (SEQ ID NO: 784) | | | |
| CCA targeting | Gluc | RESCUE | CCA | C/30/26 | L77P | gggauuggcagaucagacagccc | | 4.509 | 103B |
| | | | | | | cuggugca (SEQ ID NO: 785) | | | |
| Motif guide | Gluc | RESCUE | UCU | U/30/26 | L82F | gugaUauugaugugggacaggca | | 46.611 | 103C |
| UCU, flip U | | | | | | gaucaga (SEQ ID NO: 786) | | | |
| Motif guide | Gluc | RESCUE | UCG | U/30/26 | C82R | gugcUauugaugugggacaggca | | 57.945 | 103C |
| UCG, flip U | | | | | | gaucaga (SEQ ID NO: 787) | | | |
| Motif guide | Gluc | RESCUE | UCC | U/30/26 | P82S | guggUauugaugugggacaggca | | 57.165 | 103C |
| UCC, flip U | | | | | | gaucaga (SEQ ID NO: 788) | | | |
| Motif guide | Gluc | RESCUE | UCA | U/30/26 | H82Y | guguUauugaugugggacaggca | | 49.256 | 103C |
| UCA, flip U | | | | | | gaucaga (SEQ ID NO: 789) | | | |
| Motif guide | Gluc | RESCUE | ACU | U/30/26 | L82F | gugaUuuugaugugggacaggca | | 44.241 | 103C |
| ACU, flip U | | | | | | gaucaga (SEQ ID NO: 790) | | | |
| Motif guide | Gluc | RESCUE | ACG | U/30/26 | C82R | gugcUuuugaugugggacaggca | | 60.722 | 103C |
| ACG, flip U | | | | | | gaucaga (SEQ ID NO: 791) | | | |
| Motif guide | Gluc | RESCUE | ACC | U/30/26 | P82S | guggUuuugaugugggacaggca | | 58.056 | 103C |
| ACC, flip U | | | | | | gaucaga (SEQ ID NO: 792) | | | |
| Motif guide | Gluc | RESCUE | ACA | U/30/26 | H82Y | guguUuuugaugugggacaggca | | 40.921 | 103C |
| ACA, flip U | | | | | | gaucaga (SEQ ID NO: 793) | | | |
| Motif guide | Gluc | RESCUE | GCU | U/30/26 | L82F | gugaUcuugaugugggacaggca | | 4.603 | 103C |
| GCU, flip U | | | | | | gaucaga (SEQ ID NO: 794) | | | |
| Motif guide | Gluc | RESCUE | GCG | U/30/26 | C82R | gugcUcuugaugugggacaggca | | 43.507 | 103C |
| GCG, flip U | | | | | | gaucaga (SEQ ID NO: 795) | | | |
| Motif guide | Gluc | RESCUE | GCC | U/30/26 | P82S | guggUcuugaugugggacaggca | | 11.006 | 103C |
| GCC, flip U | | | | | | gaucaga (SEQ ID NO: 796) | | | |
| Motif guide | Gluc | RESCUE | GCA | U/30/26 | H82Y | guguUcuugaugugggacaggca | | 4.239 | 103C |
| GCA, flip U | | | | | | gaucaga (SEQ ID NO: 797) | | | |
| Motif guide | Gluc | RESCUE | CCU | U/30/26 | L82F | gugaUguugaugugggacaggca | | 11.808 | 103C |
| CCU, flip U | | | | | | gaucaga (SEQ ID NO: 798) | | | |
| Motif guide | Gluc | RESCUE | CCG | U/30/26 | C82R | gugcUguugaugugggacaggca | | 51.692 | 103C |
| CCG, flip U | | | | | | gaucaga (SEQ ID NO: 799) | | | |
| Motif guide | Gluc | RESCUE | CCC | U/30/26 | P82S | guggUguugaugugggacaggca | | 28.402 | 103C |
| CCC, flip U | | | | | | gaucaga (SEQ ID NO: 800) | | | |
| Motif guide | Gluc | RESCUE | CCA | U/30/26 | H82Y | guguUguugaugugggacaggca | | 7.597 | 103C |
| CCA, flip U | | | | | | gaucaga (SEQ ID NO: 801) | | | |
| Motif guide | Gluc | RESCUE | UCU | C/30/26 | L82F | gugaCauugaugugggacaggca | | 49.430 | 103C |
| UCU, flip C | | | | | | gaucaga (SEQ ID NO: 802) | | | |
| Motif guide | Gluc | RESCUE | UCC | C/30/26 | P82S | guggCauugaugugggacaggca | | 59.973 | 103C |
| UCC, flip C | | | | | | gaucaga (SEQ ID NO: 803) | | | |
| Motif guide | Gluc | RESCUE | UCA | C/30/26 | H82Y | guguCauugaugugggacaggca | | 48.343 | 103C |
| UCA, flip C | | | | | | gaucaga (SEQ ID NO: 804) | | | |
| Motif guide | Gluc | RESCUE | ACU | C/30/26 | L82F | gugaCuuugaugugggacaggca | | 47.840 | 103C |
| ACU, flip C | | | | | | gaucaga (SEQ ID NO: 805) | | | |
| Motif guide | Gluc | RESCUE | ACG | C/30/26 | C82R | gugcCuuugaugugggacaggca | | 70.120 | 103C |
| ACG, flip C | | | | | | (SEQ ID NO: 806) | | | |
| Motif guide | Gluc | RESCUE | ACC | C/30/26 | P82S | guggCuuugaugugggacaggca | | 58.779 | 103C |
| ACC, flip C | | | | | | gaucaga (SEQ ID NO: 807) | | | |
| Motif guide | Gluc | RESCUE | ACA | C/30/26 | H82Y | guguCuuugaugugggacaggca | | 45.594 | 103C |
| ACA, flip C | | | | | | gaucaga (SEQ ID NO: 808) | | | |
| Motif guide | Gluc | RESCUE | GCU | C/30/26 | L82F | gugaCcuugaugugggacaggca | | 3.652 | 103C |
| GCU, flip C | | | | | | gaucaga (SEQ ID NO: 809) | | | |
| Motif guide | Gluc | RESCUE | GCG | C/30/26 | C82R | gugcCcuugaugugggacaggca | | 37.719 | 103C |
| GCG, flip C | | | | | | gaucaga (SEQ ID NO: 810) | | | |
| Motif guide | Gluc | RESCUE | GCC | C/30/26 | P82S | guggCcuugaugugggacaggca | | 34.488 | 103C |
| GCC, flip C | | | | | | gaucaga (SEQ ID NO: 811) | | | |
| Motif guide | Gluc | RESCUE | GCA | C/30/26 | H82Y | guguCcuugaugugggacaggca | | 2.944 | 103C |
| GCA, flip C | | | | | | gaucaga (SEQ ID NO: 812) | | | |
| Motif guide | Gluc | RESCUE | CCU | C/30/26 | L82F | gugaCguugaugugggacaggca | | 16.647 | 103C |
| CCU, flip C | | | | | | gaucaga (SEQ ID NO: 813) | | | |
| Motif guide | Gluc | RESCUE | CCC | C/30/26 | P82S | guggCguugaugugggacaggca | | 48.269 | 103C |
| CCC, flip C | | | | | | gaucaga (SEQ ID NO: 814) | | | |
| Motif guide | Gluc | RESCUE | CCA | C/30/26 | H82Y | guguCguugaugugggacaggca | | 12.670 | 103C |
| CCA, flip C | | | | | | gaucaga (SEQ ID NO: 815) | | | |
| Non-targeting | N/A | N/A | N/A | N/A | N/A | guaaugccuggcuugucgacgca | | N/A | 104C |
| guide | | | | | | uagucug (SEQ ID NO: 816) | | | |
| Gluc specificity | Gluc | RESCUE | UCG | C/30/26 | C82R | ggugcuaGugaugugggacagc | Additional G | 10.836 | 105D |
| guide with off- | | | | | | agaucaga (SEQ ID NO: 817) | added | | |
| target A-G | | | | | | | specificity | | |
| mismatch 1 | | | | | | | | | |
| Gluc specificity | Gluc | RESCUE | UCG | C/30/26 | C82R | ggugcuauGgaugugggacaggc | Additional G | 16.037 | 105D |
| guide with off- | | | | | | agaucaga (SEQ ID NO: 818) | added | | |
| target A-G | | | | | | | specificity | | |
| mismatch 2 | | | | | | | | | |
| Gluc specificity | Gluc | RESCUE | UCG | C/30/26 | C82R | ggugcuauugaugGgggacaggc | Additional G | 29.555 | 105D |
| guide with off- | | | | | | agaucaga (SEQ ID NO: 819) | added | | |
| target A-G | | | | | | | specificity | | |
| mismatch 3 | | | | | | | | | |
| Gluc specificity | Gluc | RESCUE | UCG | C/30/26 | C82R | ggugcuaGGgaugugggacaggc | Additional G | 1.533 | 105D |
| guide with off- | | | | | | agaucaga (SEQ ID NO: 820) | added | | |
| target A-G | | | | | | | specificity | | |
| combo 1 + 2 | | | | | | | | | |
| Gluc specificity | Gluc | RESCUE | UCG | C/30/26 | C82R | ggugcuaGGgaugGgggacaggc | Additional G | 0.412 | 105D |
| guide with off- | | | | | | agaucaga (SEQ ID NO: 821) | added | | |
| target A-G | | | | | | | specificity | | |
| combo all | | | | | | | | | |
| A to I REPAIR | Cluc | REPAIR | TAG | C/50/34 | *85W | gcgcccugugcggacuccuuguc | | N/A | 106A |
| guide | | | | | | gccuucguagguguggcagcguc | | | |
| | | | | | | cuggg (SEQ ID NO: 822) | | | |
| Tiling guide 30 | Gluc | RESCUE | UCG | U/30/30 | C82R | guauugaugugggacaggcagau | | 6.327 | 115 |
| flip 30 U | | | | | | cagacagc (SEQ ID NO: 823) | | | |
| Tiling guide 30 | Gluc | RESCUE | UCG | U/30/28 | C82R | ggcuauugaugugggacaggcag | | 45.029 | 115 |
| flip 28 U | | | | | | aucagaca (SEQ ID NO: 824) | | | |
| Tiling guide 30 | Gluc | RESCUE | UCG | U/30/26 | C82R | ggugcuauugaugugggacaggc | | 54.433 | 115 |
| flip 26 U | | | | | | agaucaga (SEQ ID NO: 825) | | | |
| Tiling guide 30 | Gluc | RESCUE | UCG | U/30/24 | C82R | ggcgugcuauugaugugggacag | | 51.454 | 115 |
| flip 24 U | | | | | | gcagauca (SEQ ID NO: 826) | | | |
| Tiling guide 30 | Gluc | RESCUE | UCG | U/30/22 | C82R | ggggcgugcuauugaugugggac | | 28.375 | 115 |
| flip 22 U | | | | | | aggcagau (SEQ ID NO: 827) | | | |
| Tiling guide 30 | Gluc | RESCUE | UCG | U/30/20 | C82R | guugggcgugcuauugauguggg | | 34.460 | 115 |
| flip 20 U | | | | | | acaggcag (SEQ ID NO: 828) | | | |
| Tiling guide 30 | Gluc | RESCUE | UCG | U/30/18 | C82R | gucuugggcgugcuauugaugug | | 24.148 | 115 |
| flip 18 U | | | | | | ggacaggc (SEQ ID NO: 829) | | | |
| Tiling guide 30 | Gluc | RESCUE | UCG | U/30/16 | C82R | gcaucuugggcgugcuauugaug | | 12.372 | 115 |
| flip 16 U | | | | | | ugggacag (SEQ ID NO: 830) | | | |
| Tiling guide 30 | Gluc | RESCUE | UCG | U/30/14 | C82R | guucaucuugggcgugcuauuga | | 2.008 | 115 |
| flip 14 U | | | | | | ugugggac (SEQ ID NO: 831) | | | |
| Tiling guide 30 | Gluc | RESCUE | UCG | U/30/12 | C82R | gucuucaucuugggcgugcuauu | | 4.807 | 115 |
| flip 12 U | | | | | | gauguggg (SEQ ID NO: 832) | | | |
| Tiling guide 30 | Gluc | RESCUE | UCG | U/30/10 | C82R | gcuucuucaucuugggcgugcua | | 6.679 | 115 |
| flip 10 U | | | | | | (SEQ ID NO: 833) | | | |
| Tiling guide 30 | Gluc | RESCUE | UCG | U/30/8 | C82R | gaacuucuucaucuugggcgugc | | 0.930 | 115 |
| flip 8 U | | | | | | uauugaug (SEQ ID NO: 834) | | | |
| Tiling guide 30 | Gluc | RESCUE | UCG | U/30/6 | C82R | gugaacuucuucaucuugggcgu | | 22.763 | 115 |
| flip 6 U | | | | | | gcuauuga (SEQ ID NO: 835) | | | |
| Tiling guide 30 | Gluc | RESCUE | UCG | U/30/4 | C82R | ggaugaacuucuucaucuugggc | | 0.633 | 115 |
| flip 4 U | | | | | | gugcuauu (SEQ ID NO: 836) | | | |
| Tiling guide 30 | Gluc | RESCUE | UCG | U/30/2 | C82R | ggggaugaacuucuucaucuugg | | 0.266 | 115 |
| flip 2 U | | | | | | gcgugcua (SEQ ID NO: 837) | | | |
| Tiling guide 50 | Gluc | RESCUE | UCG | U/50/50 | C82R | guauugaugugggacaggcagau | | 1.263 | 115 |
| flip 50 U | | | | | | cagacagccccuggugcagccag | | | |
| | | | | | | cuuuc (SEQ ID NO: 838) | | | |
| Tiling guide 50 | Gluc | RESCUE | UCG | U/50/48 | C82R | ggcuauugaugugggacaggcag | | 24.879 | 115 |
| flip 48 U | | | | | | aucagacagccccuggugcagcc | | | |
| | | | | | | agcuu (SEQ ID NO: 839) | | | |
| Tiling guide 50 | Gluc | RESCUE | UCG | U/50/46 | C82R | ggugcuauugaugugggacaggc | | 21.993 | 115 |
| flip 46 U | | | | | | agaucagacagccccuggugcag | | | |
| | | | | | | ccagc (SEQ ID NO: 840) | | | |
| Tiling guide 50 | Gluc | RESCUE | UCG | U/50/44 | C82R | ggcgugcuauugaugugggacag | | 25.736 | 115 |
| flip 44 U | | | | | | gcagaucagacagccccuggugc | | | |
| | | | | | | agcca (SEQ ID NO: 841) | | | |
| Tiling guide 50 | Gluc | RESCUE | UCG | U/50/42 | C82R | ggggcgugcuauugaugugggac | | 27.579 | 115 |
| flip 42 U | | | | | | aggcagaucagacagccccuggu | | | |
| | | | | | | gcagc (SEQ ID NO: 842) | | | |
| Tiling guide 50 | Gluc | RESCUE | UCG | U/50/40 | C82R | guugggcgugcuauugauguggg | | 27.775 | 115 |
| flip 40 U | | | | | | acaggcagaucagacagccccug | | | |
| | | | | | | gugca (SEQ ID NO: 843) | | | |
| Tiling guide 50 | Gluc | RESCUE | UCG | U/50/38 | C82R | gucuugggcgugcuauugaugug | | 13.260 | 115 |
| flip 38 U | | | | | | ggacaggcagaucagacagcccc | | | |
| | | | | | | uggug (SEQ ID NO: 844) | | | |
| Tiling guide 50 | Gluc | RESCUE | UCG | U/50/36 | C82R | gcaucuugggcgugcuauugaug | | 9.892 | 115 |
| flip 36 U | | | | | | ugggacaggcagaucagacagcc | | | |
| | | | | | | ccugg (SEQ ID NO: 845) | | | |
| Tiling guide 50 | Gluc | RESCUE | UCG | U/50/34 | C82R | guucaucuugggcgugcuauuga | | 19.186 | 115 |
| flip 34 U | | | | | | ugugggacaggcagaucagacag | | | |
| | | | | | | ccccu (SEQ ID NO: 846) | | | |
| Tiling guide 50 | Gluc | RESCUE | UCG | U/50/32 | C82R | gucuucaucuugggcgugcuauu | | 22.932 | 115 |
| flip 32 U | | | | | | gaugugggacaggcagaucagac | | | |
| | | | | | | agccc (SEQ ID NO: 847) | | | |
| Tiling guide 50 | Gluc | RESCUE | UCG | U/50/30 | C82R | gcuucuucaucuugggcgugcua | | 12.794 | 115 |
| flip 30 U | | | | | | uugaugugggacaggcagaucag | | | |
| | | | | | | acagc (SEQ ID NO: 848) | | | |
| Tiling guide 50 | Gluc | RESCUE | UCG | U/50/28 | C82R | gaacuucuucaucuugggcgugc | | 33.367 | 115 |
| flip 28 U | | | | | | uauugaugugggacaggcagauc | | | |
| | | | | | | agaca (SEQ ID NO: 849) | | | |
| Tiling guide 50 | Gluc | RESCUE | UCG | U/50/26 | C82R | gugaacuucuucaucuugggcgu | | 32.651 | 115 |
| flip 26 U | | | | | | gcuauugaugugggacaggcaga | | | |
| | | | | | | ucaga (SEQ ID NO: 850) | | | |
| Tiling guide 50 | Gluc | RESCUE | UCG | U/50/24 | C82R | ggaugaacuucuucaucuugggc | | 22.201 | 115 |
| flip 24 U | | | | | | gugcuauugaugugggacaggca | | | |
| | | | | | | gauca (SEQ ID NO: 851) | | | |
| Tiling guide 50 | Gluc | RESCUE | UCG | U/50/22 | C82R | ggggaugaacuucuucaucuugg | | 12.607 | 115 |
| flip 22 U | | | | | | gcgugcuauugaugugggacagg | | | |
| | | | | | | cagau (SEQ ID NO: 852) | | | |
| Tiling guide 50 | Gluc | RESCUE | UCG | U/50/20 | C82R | gcugggaugaacuucuucaucuu | | 17.727 | 115 |
| flip 20 U | | | | | | gggcgugcuauugaugugggaca | | | |
| | | | | | | ggcag (SEQ ID NO: 853) | | | |
| Tiling guide 50 | Gluc | RESCUE | UCG | U/50/18 | C82R | guccugggaugaacuucuucauc | | 11.842 | 115 |
| flip 18 U | | | | | | uugggcgugcuauugauguggga | | | |
| | | | | | | caggc (SEQ ID NO: 854) | | | |
| Tiling guide 50 | Gluc | RESCUE | UCG | U/50/16 | C82R | gcguccugggaugaacuucuuca | | 9.368 | 115 |
| flip 16 U | | | | | | ucuugggcgugcuauugaugugg | | | |
| | | | | | | gacag (SEQ ID NO: 855) | | | |
| Tiling guide 50 | Gluc | RESCUE | UCG | U/50/14 | C82R | gagcguccugggaugaacuucuu | | 2.637 | 115 |
| flip 14 U | | | | | | caucuugggcgugcuauugaugu | | | |
| | | | | | | gggac (SEQ ID NO: 856) | | | |
| Tiling guide 50 | Gluc | RESCUE | UCG | U/50/12 | C82R | ggcagcguccugggaugaacuuc | | 35.033 | 115 |
| flip 12 U | | | | | | uucaucuugggcgugcuauugau | | | |
| | | | | | | guggg (SEQ ID NO: 857) | | | |
| Tiling guide 50 | Gluc | RESCUE | UCG | U/50/10 | C82R | guggcagcguccugggaugaacu | | 10.675 | 115 |
| flip 10 U | | | | | | ucuucaucuugggcgugcuauug | | | |
| | | | | | | augug (SEQ ID NO: 858) | | | |
| Tiling guide 50 | Gluc | RESCUE | UCG | U/50/8 | C82R | guguggcagcguccugggaugaa | | 1.730 | 115 |
| flip 8 U | | | | | | cuucuucaucuugggcgugcuau | | | |
| | | | | | | ugaug (SEQ ID NO: 859) | | | |
| Tiling guide 50 | Gluc | RESCUE | UCG | U/50/6 | C82R | ggguguggcagcguccugggaug | | 2.249 | 115 |
| flip 6 U | | | | | | aacuucuucaucuugggcgugcu | | | |
| | | | | | | auuga (SEQ ID NO: 860) | | | |
| Tiling guide 50 | Gluc | RESCUE | UCG | U/50/4 | C82R | guagguguggcagcguccuggga | | 0.438 | 115 |
| flip 4 U | | | | | | ugaacuucuucaucuugggcgug | | | |
| | | | | | | cuauu (SEQ ID NO: 861) | | | |
| Tiling guide 50 | Gluc | RESCUE | UCG | U/50/2 | C82R | gcguagguguggcagcguccugg | | 0.293 | 115 |
| flip 2 U | | | | | | gaugaacuucuucaucuugggcg | | | |
| | | | | | | ugcua (SEQ ID NO: 862) | | | |
| Motif guide | Gluc | RESCUE | UCU | A/30/26 | L82F | gugaAauugaugugggacaggca | | 0.084 | 114A- |
| UCU, flip A | | | | | | gaucaga (SEQ ID NO: 863) | | | 114C |
| Motif guide | Gluc | RESCUE | UCG | A/30/26 | C82R | gugcAauugaugugggacaggca | | 0.399 | 114A- |
| UCG, flip A | | | | | | gaucaga (SEQ ID NO: 864) | | | 114C |
| Motif guide | Gluc | RESCUE | UCC | A/30/26 | P82S | guggAauugaugugggacaggca | | 0.210 | 114A- |
| UCC, flip A | | | | | | gaucaga (SEQ ID NO: 865) | | | 114C |
| Motif guide | Gluc | RESCUE | UCA | A/30/26 | H82Y | guguAauugaugugggacaggca | | 0.077 | 114A- |
| UCA, flip A | | | | | | gaucaga (SEQ ID NO: 866) | | | 114C |
| Motif guide | Gluc | RESCUE | ACU | A/30/26 | L82F | gugaAuuugaugugggacaggca | | 0.097 | 114A- |
| ACU, flip A | | | | | | gaucaga (SEQ ID NO: 867) | | | 114C |
| Motif guide | Gluc | RESCUE | ACG | A/30/26 | C82R | gugcAuuugaugugggacaggca | | 0.399 | 114A- |
| ACG, flip A | | | | | | gaucaga (SEQ ID NO: 868) | | | 114C |
| Motif guide | Gluc | RESCUE | ACC | A/30/26 | P82S | guggAuuugaugugggacaggca | | 0.138 | 114A- |
| ACC, flip A | | | | | | gaucaga (SEQ ID NO: 869) | | | 114C |
| Motif guide | Gluc | RESCUE | ACA | A/30/26 | H82Y | guguAuuugaugugggacaggca | | 0.036 | 114A- |
| ACA, flip A | | | | | | gaucaga (SEQ ID NO: 870) | | | 114C |
| Motif guide | Gluc | RESCUE | GCU | A/30/26 | L82F | gugaAcuugaugugggacaggca | | 0.057 | 114A- |
| GCU, flip A | | | | | | gaucaga (SEQ ID NO: 871) | | | 114C |
| Motif guide | Gluc | RESCUE | GCG | A/30/26 | C82R | gugcAcuugaugugggacaggca | | 0.029 | 114A- |
| GCG, flip A | | | | | | gaucaga (SEQ ID NO: 872) | | | 114C |
| Motif guide | Gluc | RESCUE | GCC | A/30/26 | P82S | guggAcuugaugugggacaggca | | 0.023 | 114A- |
| GCC, flip A | | | | | | gaucaga (SEQ ID NO: 873) | | | 114C |
| Motif guide | Gluc | RESCUE | GCA | A/30/26 | H82Y | guguAcuugaugugggacaggca | | 0.022 | 114A-114C |
| GCA, flip A | | | | | | gaucaga (SEQ ID NO: 874) | | | |
| Motif guide | Gluc | RESCUE | CCU | A/30/26 | L82F | gugaAguugaugugggacaggca | | 0.055 | 114A-114C |
| CCU, flip A | | | | | | gaucaga (SEQ ID NO: 875) | | | |
| Motif guide | Gluc | RESCUE | CCG | A/30/26 | C82R | gugcAguugaugugggacaggca | | 0.066 | 114A-114C |
| CCG, flip A | | | | | | gaucaga (SEQ ID NO: 876) | | | |
| Motif guide | Gluc | RESCUE | CCC | A/30/26 | P82S | guggAguugaugugggacaggca | | 0.016 | 114A-114C |
| CCC, flip A | | | | | | gaucaga (SEQ ID NO: 877) | | | |
| Motif guide | Gluc | RESCUE | CCA | A/30/26 | H82Y | guguAguugaugugggacaggca | | 0.022 | 114A-114C |
| CCA, flip A | | | | | | gaucaga (SEQ ID NO: 878) | | | |
| Motif guide | Gluc | RESCUE | UCU | G/30/26 | L82F | gugaGauugaugugggacaggca | | 0.058 | 114A-114C |
| UCU, flip G | | | | | | gaucaga (SEQ ID NO: 879) | | | |
| Motif guide | Gluc | RESCUE | UCG | G/30/26 | C82R | gugcGauugaugugggacaggca | | 0.094 | 114A-114C |
| UCG, flip G | | | | | | gaucaga (SEQ ID NO: 880) | | | |
| Motif guide | Gluc | RESCUE | UCC | G/30/26 | P82S | guggGauugaugugggacaggca | | 0.022 | 114A-114C |
| UCC, flip G | | | | | | gaucaga (SEQ ID NO: 881) | | | |
| Motif guide | Gluc | RESCUE | UCA | G/30/26 | H82Y | guguGauugaugugggacaggca | | 0.026 | 114A-114C |
| UCA, flip G | | | | | | gaucaga (SEQ ID NO: 882) | | | |
| Motif guide | Gluc | RESCUE | ACU | G/30/26 | L82F | gugaGuuugaugugggacaggca | | 0.053 | 114A-114C |
| ACU, flip G | | | | | | gaucaga (SEQ ID NO: 883) | | | |
| Motif guide | Gluc | RESCUE | ACG | G/30/26 | C82R | gugcGuuugaugugggacaggca | | 0.035 | 114A-114C |
| ACG, flip G | | | | | | gaucaga (SEQ ID NO: 884) | | | |
| Motif guide | Gluc | RESCUE | ACC | G/30/26 | P82S | guggGuuugaugugggacaggca | | 0.017 | 114A-114C |
| ACC, flip G | | | | | | gaucaga (SEQ ID NO: 885) | | | |
| Motif guide | Gluc | RESCUE | ACA | G/30/26 | H82Y | guguGuuugaugugggacaggca | | 0.030 | 114A-114C |
| ACA, flip G | | | | | | gaucaga (SEQ ID NO: 886) | | | |
| Motif guide | Gluc | RESCUE | GCU | G/30/26 | L82F | gugaGcuugaugugggacaggca | | 0.053 | 114A-114C |
| GCU, flip G | | | | | | gaucaga (SEQ ID NO: 887) | | | |
| Motif guide | Gluc | RESCUE | GCG | G/30/26 | C82R | gugcGcuugaugugggacaggca | | 0.026 | 114A-114C |
| GCG, flip G | | | | | | gaucaga (SEQ ID NO: 888) | | | |
| Motif guide | Gluc | RESCUE | GCC | G/30/26 | P82S | guggGcuugaugugggacaggca | | 0.018 | 114A-114C |
| GCC, flip G | | | | | | gaucaga (SEQ ID NO: 889) | | | |
| Motif guide | Gluc | RESCUE | GCA | G/30/26 | H82Y | guguGcuugaugugggacaggca | | 0.018 | 114A-114C |
| GCA, flip G | | | | | | gaucaga (SEQ ID NO: 890) | | | |
| Motif guide | Gluc | RESCUE | CCU | G/30/26 | L82F | gugaGguugaugugggacaggca | | 0.049 | 114A-114C |
| CCU, flip G | | | | | | gaucaga (SEQ ID NO: 891) | | | |
| Motif guide | Gluc | RESCUE | CCG | G/30/26 | C82R | gugcGguugaugugggacaggca | | 0.064 | 114A-114C |
| CCG, flip G | | | | | | gaucaga (SEQ ID NO: 892) | | | |
| Motif guide | Gluc | RESCUE | CCC | G/30/26 | P82S | guggGguugaugugggacaggca | | 0.011 | 114A-114C |
| CCC, flip G | | | | | | gaucaga (SEQ ID NO: 893) | | | |
| Motif guide | Gluc | RESCUE | CCA | G/30/26 | H82Y | guguGguugaugugggacaggca | | 0.017 | 114A-114C |
| CCA, flip G | | | | | | gaucaga (SEQ ID NO: 894) | | | |
| Tiling guide 30 | Gluc | RESCUE | UCG | C/30/30 | C82R | guguugaugugggacaggcagau | | 0.164 | 122A-12224C |
| flip 30 C | | | | | | cagacagc (SEQ ID NO: 895) | | | |
| Tiling guide 30 | Gluc | RESCUE | UCG | C/30/28 | C82R | ggcuguugaugugggacaggcag | | 37.368 | 122A-122C |
| flip 28 C | | | | | | aucagaca (SEQ ID NO: 896) | | | |
| Tiling guide 30 | Gluc | RESCUE | UCG | C/30/26 | C82R | ggugcuguugaugugggacaggc | | 44.775 | 122A-122C |
| flip 26 C | | | | | | agaucaga (SEQ ID NO: 897) | | | |
| Tiling guide 30 | Gluc | RESCUE | UCG | C/30/24 | C82R | ggcgugcuguugaugugggacag | | 26.988 | 122A-122C |
| flip 24 C | | | | | | gcagauca (SEQ ID NO: 898) | | | |
| Tiling guide 30 | Gluc | RESCUE | UCG | C/30/22 | C82R | ggggcgugcuguugaugugggac | | 16.710 | 122A-122C |
| flip 22 C | | | | | | aggcagau (SEQ ID NO: 899) | | | |
| Tiling guide 30 | Gluc | RESCUE | UCG | C/30/20 | C82R | guugggcgugcuguugauguggg | | 29.288 | 122A-122C |
| flip 20 C | | | | | | acaggcag (SEQ ID NO: 900) | | | |
| Tiling guide 30 | Gluc | RESCUE | UCG | C/30/18 | C82R | gucuugggcgugcuguugaugug | | 18.125 | 122A-122C |
| flip 18 C | | | | | | ggacaggc (SEQ ID NO: 901) | | | |
| Tiling guide 30 | Gluc | RESCUE | UCG | C/30/16 | C82R | gcaucuugggcgugcuguugaug | | 1.532 | 122A-122C |
| flip 16 C | | | | | | ugggacag (SEQ ID NO: 902) | | | |
| Tiling guide 30 | Gluc | RESCUE | UCG | C/30/14 | C82R | guucaucuugggcgugcuguuga | | 0.184 | 122A-122C |
| flip 14 C | | | | | | ugugggac (SEQ ID NO: 903) | | | |
| Tiling guide 30 | Gluc | RESCUE | UCG | C/30/12 | C82R | gucuucaucuugggcgugcuguu | | 0.341 | 122A-122C |
| flip 12 C | | | | | | gauguggg (SEQ ID NO: 904) | | | |
| Tiling guide 30 | Gluc | RESCUE | UCG | C/30/10 | C82R | gcuucuucaucuugggcgugcug | | 0.275 | 122A-122C |
| flip 10 C | | | | | | uugaugug (SEQ ID NO: 905) | | | |
| Tiling guide 30 | Gluc | RESCUE | UCG | C/30/8 | C82R | gaacuucuucaucuugggcgugc | | 0.054 | 122A-122C |
| flip 8 C | | | | | | uguugaug (SEQ ID NO: 906) | | | |
| Tiling guide 30 | Gluc | RESCUE | UCG | C/30/6 | C82R | gugaacuucuucaucuugggcgu | | 0.437 | 122A-122C |
| flip 6 C | | | | | | gcuguuga (SEQ ID NO: 907) | | | |
| Tiling guide 30 | Gluc | RESCUE | UCG | C/30/4 | C82R | ggaugaacuucuucaucuugggc | | 0.226 | 122A-122C |
| flip 4 C | | | | | | gugcuguu (SEQ ID NO: 908) | | | |
| Tiling guide 30 | Gluc | RESCUE | UCG | C/30/2 | C82R | ggggaugaacuucuucaucuugg | | 0.040 | 122A-122C |
| flip 2 C | | | | | | gcgugcug (SEQ ID NO: 909) | | | |

TABLE 30
Guide sequences used for endogenous gene editing

| | | | | | | | Editing | |
|---|---|---|---|---|---|---|---|---|
| | | | | Base | | | percent- | |
| | Target- | | | flip/ | | | age | First |
| | ed | REPAIR/ | | posi- | Codon | | (first | fig- |
| Name | gene | RESCUE | Motif | tion | change | Spacer sequence | figure) | ure |
| S33F_CTNNB1_30bp_guide_30_9 | CTNNB1 | RESCUE | UCU | C/22 | S33F | GGGAUUCCACAGUCCAGGU | 11.245 | 103E |
| C flip | | | | | | AAGACUGUUGCU (SEQ ID | | |
| | | | | | | NO: 910) | | |
| H36Y_CTNNB1_30bp_guide_30_9 | CTNNB1 | RESCUE | CCA | U/22 | H36Y | GACCAGAAUUGAUUCCAGA | 2.995 | 103E |
| U flip | | | | | | GUCCAGGUAAGA (SEQ ID | | |
| | | | | | | NO: 911) | | |
| S37F_CTNNB1_30bp_guide_30_9 | CTNNB1 | RESCUE | UCU | U/22 | S37F | GUGGCACCAUAAUGGAUUC | 17.616 | 103E |
| U flip | | | | | | CAGAGUCCAGGU (SEQ ID | | |
| | | | | | | NO: 912) | | |
| T41I_CTNNB1_30bp_guide_30_11 | CTNNB1 | RESCUE | ACC | U/20 | T41I | GAGGAGCUGUGUUAGUGGC | 15.711 | 103E |
| U flip | | | | | | ACCAGAAUGGAU (SEQ ID | | |
| | | | | | | NO: 913) | | |
| P44L_CTNNB1_30bp_guide_30_9 | CTNNB1 | RESCUE | CCU | C/22 | P44L | GUCAGAGAACGAGCUGUGG | 8.599 | 103E |
| C flip | | | | | | UAGUGGCACCAG (SEQ ID | | |
| | | | | | | NO: 914) | | |
| P44S_CTNNB1_30bp_guide_30_11 | CTNNB1 | RESCUE | UCU | U/20 | P44S | GCUCAGAGAAGUAGCUGUG | 22.839 | 103E |
| U flip | | | | | | GUAGUGGCACCA (SEQ ID | | |
| | | | | | | NO: 915) | | |
| S45F_CTNNB1_30bp_guide_30_11 | CTNNB1 | RESCUE | UCU | C/20 | S45F | GACCACUCAGACAAGGAGC | 12.412 | 103E |
| C flip | | | | | | UGUGGUAGUGGC (SEQ ID | | |
| | | | | | | NO: 916) | | |
| TCG_KRAS_30bp_guide_30_7 U | KRAS | RESCUE | UCG | U/24 | L56L | GUGUGUCUAGAAUAUCCAA | 18.405 | 103E |
| flip | | | | | | GAGACAGGUUUC (SEQ ID | | |
| | | | | | | NO: 917) | | |
| ACG_KRAS_30bp_guide_30_11 C | KRAS | RESCUE | ACG | C/20 | D30D | GGAUCAUAUUCCUCCACAA | 34.013 | 103E |
| flip | | | | | | AAUGAUUCUGAA (SEQ ID | | |
| | | | | | | NO: 918) | | |
| GCG_KRAS_30bp_guide_30_11 U | KRAS | RESCUE | GCG | U/20 | G13G | GUCUUGCCUACUCCACCAG | 2.180 | 103E |
| flip | | | | | | CUCCAACUACCA (SEQ ID | | |
| | | | | | | NO: 919) | | |
| CCT_KRAS_30bp_guide_30_11 C | KRAS | RESCUE | CCU | C/20 | A18A | GGUAUCGUCAACGCACUCU | 9.465 | 103E |
| flip | | | | | | UGCCUACGCCAC (SEQ ID | | |
| | | | | | | NO: 920) | | |
| TCG_PPIB_30bp_guide_30_11 U | PPIB | RESCUE | UCG | U/20 | I18I | GCGGACCCCGCUAUGAGGG | 10.340 | 103E |
| flip | | | | | | CGGCGGCAAGGA (SEQ ID | | |
| | | | | | | NO: 921) | | |
| ACG_PPIB_30bp_guide_30_7 C | PPIB | RESCUE | ACG | C/24 | R7C | GAUAUUCCUCCACAAAAUG | 34.213 | 103E |
| flip | | | | | | AUUCUGAAUUAG (SEQ ID | | |
| | | | | | | NO: 922) | | |
| GCG_PPIB_30bp_guide_30_11 U | PPIB | RESCUE | GCG | U/20 | A19V | GGACGGACCCCUCGAUGAG | 4.778 | 103E |
| flip | | | | | | GGCGGCGGCAAG (SEQ ID | | |
| | | | | | | NO: 923) | | |
| CCG_PPIB_30bp_guide_30_11 C | PPIB | RESCUE | CCG | C/20 | S21S | GGGAAGAAGACCGACCCCG | 6.101 | 103E |
| flip | | | | | | CGAUGAGGGCGG (SEQ ID | | |
| | | | | | | NO: 924) | | |
| TCG_SMARCA4_30bp_guide_30_9 | SMARCA4 | RESCUE | UCG | U/22 | S85L | GGGUCGUCCUACAUGCCCU | 6.807 | 103E |
| U flip | | | | | | UCUCAUGCAUGG (SEQ ID | | |
| | | | | | | NO: 925) | | |
| ACG_SMARCA4_30bp_guide_30_11 | SMARCA4 | RESCUE | ACG | U/20 | D86D | GAGCGCGGGUCUUCCGACA | 6.943 | 103E |
| U flip | | | | | | UGCCCUUCUCAU (SEQ ID | | |
| | | | | | | NO: 926) | | |
| GCG_SMARCA4_30bp_guide_30_11 | SMARCA4 | RESCUE | GCG | C/20 | R89C | GUGGUUGUAGCCCGGGUCG | 2.277 | 103E |
| C flip | | | | | | UCCGACAUGCCC (SEQ ID | | |
| | | | | | | NO: 927) | | |
| CCG_SMARCA4_30bp_guide_30_11 | SMARCA4 | RESCUE | CCG | U/20 | P88L | GGUUGUAGCGCUGGUCGUC | 4.819 | 103E |
| U flip | | | | | | CGACAUGCCCUU (SEQ ID | | |
| | | | | | | NO: 928) | | |
| NRAS_C-flip_guide_30_11 | NRAS | RESCUE | UCC | C/20 | I21I | GGGAUUAGCUGCAUUGUCA | 21.529 | 103E |
| | | | | | | GUGCGCUUUUCC (SEQ ID | | |
| | | | | | | NO: 929) | | |
| NKFB1_U-flip_guide_30_11 | NFKB | RESCUE | ACC | U/20 | P33S | GGCCAUCUGUGUUUGAAAU | 24.376 | 103E |
| | | | | | | ACUUCUGGAUUA (SEQ ID | | |
| | | | | | | NO: 930) | | |
| EZH2_U-flip_guide_30_11 | EZH2 | RESCUE | UCA | U/20 | F32F | GCAGCUCGUCUUAACCUCU | 15.855 | 103E |
| | | | | | | UGAGCUGUCUCA (SEQ ID | | |
| | | | | | | NO: 931) | | |
| NF2_U-flip_guide_30_7 | NF2 | RESCUE | ACG | U/24 | T21M | GGUGAACUUCUUGGGUUGC | 24.904 | 103E |
| | | | | | | UUCCUCUUGAGA (SEQ ID | | |
| | | | | | | NO: 932) | | |
| RAF1_U-flip_guide_30_7 | RAF1 | RESCUE | UCC | U/24 | P30S | GUUGUAGUAGAGAUGCAGC | 20.867 | 103E |
| | | | | | | UGGAGCCAUCAA (SEQ ID | | |
| | | | | | | NO: 933) | | |
| S33F_CTNNB1_30bp_guide_U- | CTNNB1 | RESCUE | UCU | U/24 | S33F | GAUUCCAUAGUCCAGGUAA | 9.227 | 125A |
| flip_30_7 | | | | | | GACUGUUGCUGC (SEQ ID | | |
| | | | | | | NO: 934) | | |
| S33F_CTNNB1_30bp_guide_U- | CTNNB1 | RESCUE | UCU | U/22 | S33F | GGGAUUCCAUAGUCCAGGU | 11.245 | 125A |
| flip_30_9 | | | | | | AAGACUGUUGCU (SEQ ID | | |
| | | | | | | NO: 935) | | |
| S33F_CTNNB1_30bp_guide_U- | CTNNB1 | RESCUE | UCU | U/20 | S33F | GAUGGAUUCCAUAGUCCAG | 7.081 | 125A |
| flip_30_11 | | | | | | GUAAGACUGUUG (SEQ ID | | |
| | | | | | | NO: 936) | | |
| S33F_CTNNB1_30bp_guide_U- | CTNNB1 | RESCUE | UCU | U/18 | S33F | GGAAUGGAUUCCAUAGUCC | 9.782 | 125A |
| flip_30_13 | | | | | | AGGUAAGACUGU (SEQ ID | | |
| | | | | | | NO: 937) | | |
| H36Y_CTNNB1_30bp_guide_U- | CTNNB1 | RESCUE | CCA | U/24 | H36Y | GCAGAAUUGAUUCCAGAGU | 1.310 | 125A |
| flip_30_7 | | | | | | CCAGGUAAGACU (SEQ ID | | |
| | | | | | | NO: 938) | | |
| H36Y_CTNNB1_30bp_guide_U- | CTNNB1 | RESCUE | CCA | U/22 | H36Y | GACCAGAAUUGAUUCCAGA | 2.995 | 125A |
| flip_30_9 | | | | | | GUCCAGGUAAGA (SEQ ID | | |
| | | | | | | NO: 939) | | |
| H36Y_CTNNB1_30bp_guide_U- | CTNNB1 | RESCUE | CCA | U/20 | H36Y | GGCACCAGAAUUGAUUCCA | 0.918 | 125A |
| flip_30_11 | | | | | | GAGUCCAGGUAA (SEQ ID | | |
| | | | | | | NO: 940) | | |
| H36Y_CTNNB1_30bp_guide_U- | CTNNB1 | RESCUE | CCA | U/18 | H36Y | GUGGCACCAGAAUUGAUUC | 1.061 | 125A |
| flip_30_13 | | | | | | CAGAGUCCAGGU (SEQ ID | | |
| | | | | | | NO: 941) | | |
| S37F CTNNB1_30bp_guide_U- | CTNNB1 | RESCUE | UCU | U/24 | S37F | GGCACCAUAAUGGAUUCCA | 17.616 | 125A |
| flip_30_7 | | | | | | GAGUCCAGGUAA (SEQ ID | | |
| | | | | | | NO: 942) | | |
| S37F_CTNNB1_30bp_guide_U- | CTNNB1 | RESCUE | UCU | U/22 | S37F | GUGGCACCAUAAUGGAUUC | 10.901 | 125A |
| flip_30_9 | | | | | | CAGAGUCCAGGU (SEQ ID | | |
| | | | | | | NO: 943) | | |
| S37F_CTNNB1_30bp_guide_U- | CTNNB1 | RESCUE | UCU | U/20 | S37F | GAGUGGCACCAUAAUGGAU | 8.898 | 125A |
| flip_30_11 | | | | | | UCCAGAGUCCAG (SEQ ID | | |
| | | | | | | NO: 944) | | |
| S37F_CTNNB1_30bp_guide_U- | CTNNB1 | RESCUE | UCU | U/18 | S37F | GGUAGUGGCACCAUAAUGG | 11.718 | 125A |
| flip_30_13 | | | | | | AUUCCAGAGUCC (SEQ ID | | |
| | | | | | | NO: 945) | | |
| T41I_CTNNB1_30bp_guide_U- | CTNNB1 | RESCUE | ACC | U/24 | T41I | GGCUGUGUUAGUGGCACCA | 4.936 | 125A |
| flip_30_7 | | | | | | GAAUGGAUUCCA (SEQ ID | | |
| | | | | | | NO: 946) | | |
| T41I_CTNNB1_30bp_guide_U- | CTNNB1 | RESCUE | ACC | U/22 | T41I | GGAGCUGUGUUAGUGGCAC | 14.554 | 125A |
| flip_30_9 | | | | | | CAGAAUGGAUUC (SEQ ID | | |
| | | | | | | NO: 947) | | |
| T41I_CTNNB1_30bp_guide_U- | CTNNB1 | RESCUE | ACC | U/20 | T41I | GAGGAGCUGUGUUAGUGGC | 14.890 | 125A |
| flip_30_11 | | | | | | ACCAGAAUGGAU (SEQ ID | | |
| | | | | | | NO: 948) | | |
| T41I_CTNNB1_30bp_guide_U- | CTNNB1 | RESCUE | ACC | U/18 | T41I | GGAAGGAGCUGUGUUAGUG | 15.711 | 125A |
| flip_30_13 | | | | | | GCACCAGAAUGG (SEQ ID | | |
| | | | | | | NO: 949) | | |
| P44L_CTNNB1_30bp_guide_U- | CTNNB1 | RESCUE | CCU | U/24 | P44L | GAGAGAAUGAGCUGUGGUA | 3.767 | 125A |
| flip_30_7 | | | | | | GUGGCACCAGAA (SEQ ID | | |
| | | | | | | NO: 950) | | |
| P44L_CTNNB1_30bp_guide_U- | CTNNB1 | RESCUE | CCU | U/22 | P44L | GUCAGAGAAUGAGCUGUGG | 6.569 | 125A |
| flip_30_9 | | | | | | UAGUGGCACCAG (SEQ ID | | |
| | | | | | | NO: 951) | | |
| P44L_CTNNB1_30bp_guide_U- | CTNNB1 | RESCUE | CCU | U/20 | P44L | GACUCAGAGAAUGAGCUGU | 8.599 | 125A |
| flip_30_11 | | | | | | GGUAGUGGCACC (SEQ ID | | |
| | | | | | | NO: 952) | | |
| P44L_CTNNB1_30bp_guide_U- | CTNNB1 | RESCUE | CCU | U/18 | P44L | GCCACUCAGAGAAUGAGCU | 2.435 | 125A |
| flip_30_13 | | | | | | GUGGUAGUGGCA (SEQ ID | | |
| | | | | | | NO: 953) | | |
| P44S_CTNNB1_30bp_guide_U- | CTNNB1 | RESCUE | UCU | U/24 | P44S | GGAGAAGUAGCUGUGGUAG | 16.371 | 125A |
| flip_30_7 | | | | | | UGGCACCAGAAU (SEQ ID | | |
| | | | | | | NO: 954) | | |
| P44S_CTNNB1_30bp_guide_U- | CTNNB1 | RESCUE | UCU | U/22 | P44S | GCAGAGAAGUAGCUGUGGU | 22.090 | 125A |
| flip_30_9 | | | | | | AGUGGCACCAGA (SEQ ID | | |
| | | | | | | NO: 955) | | |
| P44S_CTNNB1_30bp_guide_U- | CTNNB1 | RESCUE | UCU | U/20 | P44S | GCUCAGAGAAGUAGCUGUG | 22.839 | 125A |
| flip_30_11 | | | | | | GUAGUGGCACCA (SEQ ID | | |
| | | | | | | NO: 956) | | |
| P44S_CTNNB1_30bp_guide_U- | CTNNB1 | RESCUE | UCU | U/18 | P44S | GCACUCAGAGAAGUAGCUG | 15.900 | 125A |
| flip_30_13 | | | | | | UGGUAGUGGCAC (SEQ ID | | |
| | | | | | | NO: 957) | | |
| S45F_CTNNB1_30bp_guide_U- | CTNNB1 | RESCUE | UCU | U/24 | S45F | GCUCAGAUAAGGAGCUGUG | 7.049 | 125A |
| flip_30_7 | | | | | | GUAGUGGCACCA (SEQ ID | | |
| | | | | | | NO: 958) | | |
| S45F_CTNNB1_30bp_guide_U- | | | | | | GCACUCAGAUAAGGAGCUG | | |
| flip_30_9 | CTNNB1 | RESCUE | UCU | U/22 | S45F | UGGUAGUGGCAC (SEQ ID | 9.828 | 125A |
| | | | | | | NO: 959) | | |
| S45F_CTNNB1_30bp_guide_U- | CTNNB1 | RESCUE | UCU | U/20 | S45F | GACCACUCAGAUAAGGAGC | 12.412 | 125A |
| flip_30_11 | | | | | | UGUGGUAGUGGC (SEQ ID | | |
| | | | | | | NO: 960) | | |
| S45F_CTNNB1_30bp_guide_U- | CTNNB1 | RESCUE | UCU | U/18 | S45F | GUUACCACUCAGAUAAGGA | 9.093 | 125A |
| flip_30_13 | | | | | | GCUGUGGUAGUG (SEQ ID | | |
| | | | | | | NO: 961) | | |
| TCG_KRAS_30bp_guide_U- | KRAS | RESCUE | UCG | U/24 | L56L | GUGUGUCUAGAAUAUCCAA | 18.707 | 125A |
| flip_30_7 | | | | | | GAGACAGGUUUC (SEQ ID | | |
| | | | | | | NO: 962) | | |
| TCG_KRAS_30bp_guide_U- | KRAS | RESCUE | UCG | U/22 | L56L | GGCUGUGUCUAGAAUAUCC | 18.405 | 125A |
| flip_30_9 | | | | | | AAGAGACAGGUU (SEQ ID | | |
| | | | | | | NO: 963) | | |
| TCG_KRAS_30bp_guide_U- | KRAS | RESCUE | UCG | U/20 | L56L | GCUGCUGUGUCUAGAAUAU | 15.533 | 125A |
| flip_30_11 | | | | | | CCAAGAGACAGG (SEQ ID | | |
| | | | | | | NO: 964) | | |
| TCG_KRAS_30bp_guide_U- | KRAS | RESCUE | UCG | U/18 | L56L | GACCUGCUGUGUCUAGAAU | 15.119 | 125A |
| flip_30_13 | | | | | | AUCCAAGAGACA (SEQ ID | | |
| | | | | | | NO: 965) | | |
| ACG_KRAS_30bp_guide_U- | KRAS | RESCUE | ACG | U/24 | D30D | GAUAUUCUUCCACAAAAUG | 21.288 | 125A |
| flip_30_7 | | | | | | AUUCUGAAUUAG (SEQ ID | | |
| | | | | | | NO: 966) | | |
| ACG_KRAS_30bp_guide_U- | KRAS | RESCUE | ACG | U/22 | D30D | GUCAUAUUCUUCCACAAAA | 24.011 | 125A |
| flip_30_9 | | | | | | UGAUUCUGAAUU (SEQ ID | | |
| | | | | | | NO: 967) | | |
| ACG_KRAS_30bp_guide_U- | KRAS | RESCUE | ACG | U/20 | D30D | GGAUCAUAUUCUUCCACAA | 34.013 | 125A |
| flip_30_11 | | | | | | AAUGAUUCUGAA (SEQ ID | | |
| | | | | | | NO: 968) | | |
| ACG_KRAS_30bp_guide_U- | KRAS | RESCUE | ACG | U/18 | D30D | GUGGAUCAUAUUCUUCCAC | 22.047 | 125A |
| flip_30_13 | | | | | | AAAAUGAUUCUG (SEQ ID | | |
| | | | | | | NO: 969) | | |
| GCG_KRAS_30bp_guide_U- | KRAS | RESCUE | GCG | U/24 | G13G | GGCCUACUCCACCAGCUCC | 0.476 | 125A |
| flip_30_7 | | | | | | AACUACCACAAG (SEQ ID | | |
| | | | | | | NO: 970) | | |
| GCG_KRAS_30bp_guide_U- | KRAS | RESCUE | GCG | U/22 | G13G | GUUGCCUACUCCACCAGCU | 1.735 | 125A |
| flip_30_9 | | | | | | CCAACUACCACA (SEQ ID | | |
| | | | | | | NO: 971) | | |
| GCG_KRAS_30bp_guide_U- | KRAS | RESCUE | GCG | U/20 | G13G | GUCUUGCCUACUCCACCAG | 2.180 | 125A |
| flip_30_11 | | | | | | CUCCAACUACCA (SEQ ID | | |
| | | | | | | NO: 972) | | |
| GCG_KRAS_30bp_guide_U- | KRAS | RESCUE | GCG | U/18 | G13G | GACUCUUGCCUACUCCACC | 0.559 | 125A |
| flip_30_13 | | | | | | AGCUCCAACUA (SEQ ID | | |
| | | | | | | NO: 973) | | |
| CCT_KRAS_30bp_guide_U- | KRAS | RESCUE | CCU | U/24 | A18A | GCGUCAAUGCACUCUUGCC | 1.694 | 125A |
| flip_30_7 | | | | | | UACGCCACCAGC (SEQ ID | | |
| | | | | | | NO: 974) | | |
| CCT_KRAS_30bp_guide_U- | KRAS | RESCUE | CCU | U/22 | A18A | GAUCGUCAAUGCACUCUUG | 6.043 | 125A |
| flip_30_9 | | | | | | CCUACGCCACCA (SEQ ID | | |
| | | | | | | NO: 975) | | |
| CCT_KRAS_30bp_guide_U- | KRAS | RESCUE | CCU | U/20 | A18A | GGUAUCGUCAAUGCACUCU | 9.465 | 125A |
| flip_30_11 | | | | | | UGCCUACGCCAC (SEQ ID | | |
| | | | | | | NO: 976) | | |
| CCT_KRAS_30bp_guide_U- | KRAS | RESCUE | CCU | U/18 | A18A | GCUGUAUCGUCAAUGCACU | 3.147 | 125A |
| flip_30_13 | | | | | | CUUGCCUACGCC (SEQ ID | | |
| | | | | | | NO: 977) | | |
| TCG_PPIB_30bp_guide_U- | PPIB | RESCUE | UCG | U/24 | I18I | GCCCCGCUAUGAGGGCGGC | 5.536 | 125A |
| flip_30_7 | | | | | | GGCAAGGAGCAC (SEQ ID | | |
| | | | | | | NO: 978) | | |
| TCG_PPIB_30bp_guide_U- | PPIB | RESCUE | UCG | U/22 | I18I | GGACCCCGCUAUGAGGGCG | 8.914 | 125A |
| flip_30_9 | | | | | | GCGGCAAGGAGC (SEQ ID | | |
| | | | | | | NO: 979) | | |
| TCG_PPIB_30bp_guide_U- | PPIB | RESCUE | UCG | U/20 | I18I | GCGGACCCCGCUAUGAGGG | 10.340 | 125A |
| flip_30_11 | | | | | | CGGCGGCAAGGA (SEQ ID | | |
| | | | | | | NO: 980) | | |
| TCG_PPIB_30bp_guide_U- | PPIB | RESCUE | UCG | U/18 | I18I | GGACGGACCCCGCUAUGAG | 8.663 | 125A |
| flip_30_13 | | | | | | GGCGGCGGCAAG (SEQ ID | | |
| | | | | | | NO: 981) | | |
| ACG_PPIB_30bp_guide_U- | PPIB | RESCUE | ACG | U/24 | R7C | GUGUUGCUUUCGGAGAGGC | 34.213 | 125A |
| flip_30_7 | | | | | | GCAGCAUCCACA (SEQ ID | | |
| | | | | | | NO: 982) | | |
| ACG_PPIB_30bp_guide_U- | PPIB | RESCUE | ACG | U/22 | R7C | GCAUGUUGCUUUCGGAGAG | 31.652 | 125A |
| flip_30_9 | | | | | | GCGCAGCAUCCA (SEQ ID | | |
| | | | | | | NO: 983) | | |
| ACG_PPIB_30bp_guide_U- | PPIB | RESCUE | ACG | U/20 | R7C | GUUCAUGUUGCUUUCGGAG | 26.969 | 125A |
| flip_30_11 | | | | | | AGGCGCAGCAUC (SEQ ID | | |
| | | | | | | NO: 984) | | |
| ACG_PPIB_30bp_guide_U- | PPIB | RESCUE | ACG | U/18 | R7C | GCCUUCAUGUUGCUUUCGG | 22.539 | 125A |
| flip_30_13 | | | | | | AGAGGCGCAGCA (SEQ ID | | |
| | | | | | | NO: 985) | | |
| GCG_PPIB_30bp_guide_U- | PPIB | RESCUE | GCG | U/24 | A19V | GGACCCCUCGAUGAGGGCG | 1.030 | 125A |
| flip_30_7 | | | | | | GCGGCAAGGAGC (SEQ ID | | |
| | | | | | | NO: 986) | | |
| GCG_PPIB_30bp_guide_U- | PPIB | RESCUE | GCG | U/22 | A19V | GCGGACCCCUCGAUGAGGG | 4.819 | 125A |
| flip_30_9 | | | | | | CGGCGGCAAGGA (SEQ ID | | |
| | | | | | | NO: 987) | | |
| GCG_PPIB_30bp_guide_U- | PPIB | RESCUE | GCG | U/20 | A19V | GGACGGACCCCUCGAUGAG | 4.778 | 125A |
| flip_30_11 | | | | | | GGCGGCGGCAAG (SEQ ID | | |
| | | | | | | NO: 988) | | |
| GCG_PPIB_30bp_guide_U- | PPIB | RESCUE | GCG | U/18 | A19V | GAAGACGGACCCCUCGAUG | 1.115 | 125A |
| flip_30_13 | | | | | | AGGGCGGCGGCA (SEQ ID | | |
| | | | | | | NO: 989) | | |
| CCG_PPIB_30bp_guide_U- | PPIB | RESCUE | CCG | U/24 | S21S | GGAAGACUGACCCCGCGAU | 3.150 | 125A |
| flip_30_7 | | | | | | GAGGGCGGCGGC (SEQ ID | | |
| | | | | | | NO: 990) | | |
| CCG_PPIB_30bp_guide_U- | PPIB | RESCUE | CCG | U/22 | S21S | GAAGAAGACUGACCCCGCG | 2.659 | 125A |
| flip_30_9 | | | | | | AUGAGGGCGGCG (SEQ ID | | |
| | | | | | | NO: 991) | | |
| CCG_PPIB_30bp_guide_U- | PPIB | RESCUE | CCG | U/20 | S21S | GGGAAGAAGACUGACCCCG | 6.101 | 125A |
| flip_30_11 | | | | | | CGAUGAGGGCGG (SEQ ID | | |
| | | | | | | NO: 992) | | |
| CCG_PPIB_30bp_guide_U- | PPIB | RESCUE | CCG | U/18 | S21S | GCAGGAAGAAGACUGACCC | 4.372 | 125A |
| flip_30_13 | | | | | | CGCGAUGAGGGC (SEQ ID | | |
| | | | | | | NO: 993) | | |
| TCG_SMARCA4_30bp_guide_U- | SMARCA4 | RESCUE | UCG | U/24 | S85L | GUCGUCCUACAUGCCCUUC | 5.692 | 125A |
| flip_30_7 | | | | | | UCAUGCAUGGAC (SEQ ID | | |
| | | | | | | NO: 994) | | |
| TCG_SMARCA4_30bp_guide_U- | SMARCA4 | RESCUE | UCG | U/22 | S85L | GGGUCGUCCUACAUGCCCU | 6.807 | 125A |
| flip_30_9 | | | | | | UCUCAUGCAUGG (SEQ ID | | |
| | | | | | | NO: 995) | | |
| TCG_SMARCA4_30bp_guide_U- | SMARCA4 | RESCUE | UCG | U/20 | S85L | GCGGGUCGUCCUACAUGCC | 3.724 | 125A |
| flip_30_11 | | | | | | CUUCUCAUGCAU (SEQ ID | | |
| | | | | | | NO: 996) | | |
| TCG_SMARCA4_30bp_guide_U- | SMARCA4 | RESCUE | UCG | U/18 | S85L | GCGCGGGUCGUCCUACAUG | 2.274 | 125A |
| flip_30_13 | | | | | | CCCUUCUCAUGC (SEQ ID | | |
| | | | | | | NO: 997) | | |
| ACG_SMARCA4_30bp_guide_U- | SMARCA4 | RESCUE | ACG | U/24 | D86D | GCGGGUCUUCCGACAUGCC | 3.689 | 125A |
| flip_30_7 | | | | | | CUUCUCAUGCAU (SEQ ID | | |
| | | | | | | NO: 998) | | |
| ACG_SMARCA4_30bp_guide_U- | SMARCA4 | RESCUE | ACG | U/22 | D86D | GCGCGGGUCUUCCGACAUG | 4.868 | 125A |
| flip_30_9 | | | | | | CCCUUCUCAUGC (SEQ ID | | |
| | | | | | | NO: 999) | | |
| ACG_SMARCA4_30bp_guide_U- | SMARCA4 | RESCUE | ACG | U/20 | D86D | GAGCGCGGGUCUUCCGACA | 6.943 | 125A |
| flip_30_11 | | | | | | UGCCCUUCUCAU (SEQ ID | | |
| | | | | | | NO: 1000) | | |
| ACG_SMARCA4_30bp_guide_U- | SMARCA4 | RESCUE | ACG | U/18 | D86D | GGUAGCGCGGGUCUUCCGA | 5.785 | 125A |
| flip_30_13 | | | | | | CAUGCCCUUCUC (SEQ ID | | |
| | | | | | | NO: 1001) | | |
| GCG_SMARCA4_30bp_guide_U- | SMARCA4 | RESCUE | GCG | U/24 | R89C | GUGUAGCUCGGGUCGUCCG | 0.642 | 125A |
| flip_30_7 | | | | | | ACAUGCCCUUCU (SEQ ID | | |
| | | | | | | NO: 1002) | | |
| GCG_SMARCA4_30bp_guide_U- | SMARCA4 | RESCUE | GCG | U/22 | R89C | GGUUGUAGCUCGGGUCGUC | 1.808 | 125A |
| flip_30_9 | | | | | | CGACAUGCCCUU (SEQ ID | | |
| | | | | | | NO: 1003) | | |
| GCG_SMARCA4_30bp_guide_U- | SMARCA4 | RESCUE | GCG | U/20 | R89C | GUGGUUGUAGCUCGGGUCG | 2.277 | 125A |
| flip_30_11 | | | | | | UCCGACAUGCCC (SEQ ID | | |
| | | | | | | NO: 1004) | | |
| GCG_SMARCA4_30bp_guide_U- | SMARCA4 | RESCUE | GCG | U/18 | R89C | GUCUGGUUGUAGCUCGGGU | 1.323 | 125A |
| flip_30_13 | | | | | | CGUCCGACAUGC (SEQ ID | | |
| | | | | | | NO: 1005) | | |
| CCG_SMARCA4_30bp_guide_U- | SMARCA4 | RESCUE | CCG | U/24 | P88L | GUAGCGCUGGUCGUCCGAC | 4.412 | 125A |
| flip_30_7 | | | | | | AUGCCCUUCUCA (SEQ ID | | |
| | | | | | | NO: 1006) | | |
| CCG_SMARCA4_30bp_guide_U- | SMARCA4 | RESCUE | CCG | U/22 | P88L | GUGUAGCGCUGGUCGUCCG | 2.911 | 125A |
| flip_30_9 | | | | | | ACAUGCCCUUCU (SEQ ID | | |
| | | | | | | NO: 1007) | | |
| CCG_SMARCA4_30bp_guide_U- | SMARCA4 | RESCUE | CCG | U/20 | P88L | GGUUGUAGCGCUGGUCGUC | 4.819 | 125A |
| flip_30_11 | | | | | | CGACAUGCCCUU (SEQ ID | | |
| | | | | | | NO: 1008) | | |
| CCG_SMARCA4_30bp_guide_U- | SMARCA4 | RESCUE | CCG | U/18 | P88L | GUGGUUGUAGCGCUGGUCG | 0.841 | 125A |
| flip_30_13 | | | | | | UCCGACAUGCCC (SEQ ID | | |
| | | | | | | NO: 1009) | | |
| S33F_CTNNB1_30bp_C- | CTNNB1 | RESCUE | UCU | C/24 | S33F | GAUUCCACAGUCCAGGUAA | 7.351 | 125B |
| flip_guide_30_7 | | | | | | GACUGUUGCUGC (SEQ ID | | |
| | | | | | | NO: 1010) | | |
| S33F_CTNNB1_30bp_C- | CTNNB1 | RESCUE | UCU | C/22 | S33F | GGGAUUCCACAGUCCAGGU | 8.783 | 125B |
| flip_guide_30_9 | | | | | | AAGACUGUUGCU (SEQ ID | | |
| | | | | | | NO: 1011) | | |
| S33F_CTNNB1_30bp_C- | CTNNB1 | RESCUE | UCU | C/20 | S33F | GAUGGAUUCCACAGUCCAG | 6.063 | 125B |
| flip_guide_30_11 | | | | | | GUAAGACUGUUG (SEQ ID | | |
| | | | | | | NO: 1012) | | |
| S33F_CTNNB1_30bp_C- | CTNNB1 | RESCUE | UCU | C/18 | S33F | GGAAUGGAUUCCACAGUCC | 7.893 | 125B |
| flip_guide_30_13 | | | | | | AGGUAAGACUGU (SEQ ID | | |
| | | | | | | NO: 1013) | | |
| H36Y_CTNNB1_30bp_C- | CTNNB1 | RESCUE | CCA | C/24 | H36Y | GCAGAAUCGAUUCCAGAGU | 0.406 | 125B |
| flip_guide_30_7 | | | | | | CCAGGUAAGACU (SEQ ID | | |
| | | | | | | NO: 1014) | | |
| H36Y_CTNNB1_30bp_C- | CTNNB1 | RESCUE | CCA | C/22 | H36Y | GACCAGAAUCGAUUCCAGA | 1.178 | 125B |
| flip_guide_30_9 | | | | | | GUCCAGGUAAGA (SEQ ID | | |
| | | | | | | NO: 1015) | | |
| H36Y_CTNNB1_30bp_C- | CTNNB1 | RESCUE | CCA | C/20 | H36Y | GGCACCAGAAUCGAUUCCA | 0.369 | 125B |
| flip_guide_30_11 | | | | | | GAGUCCAGGUAA (SEQ ID | | |
| | | | | | | NO: 1016) | | |
| H36Y_CTNNB1_30bp_C- | CTNNB1 | RESCUE | CCA | C/18 | H36Y | GUGGCACCAGAAUCGAUUC | 0.589 | 125B |
| flip_guide_30_13 | | | | | | CAGAGUCCAGGU (SEQ ID | | |
| | | | | | | NO: 1017) | | |
| S37F_CTNNB1_30bp_C- | CTNNB1 | RESCUE | UCU | C/24 | S37F | GGCACCACAAUGGAUUCCA | 7.132 | 125B |
| flip_guide_30_7 | | | | | | GAGUCCAGGUAA (SEQ ID | | |
| | | | | | | NO: 1018) | | |
| S37F_CTNNB1_30bp_C- | CTNNB1 | RESCUE | UCU | C/22 | S37F | GUGGCACCACAAUGGAUUC | 8.465 | 125B |
| flip_guide_30_9 | | | | | | CAGAGUCCAGGU (SEQ ID | | |
| | | | | | | NO: 1019) | | |
| S37F_CTNNB1_30bp_C- | CTNNB1 | RESCUE | UCU | C/20 | S37F | GAGUGGCACCACAAUGGAU | 9.422 | 125B |
| flip_guide_30_11 | | | | | | UCCAGAGUCCAG (SEQ ID | | |
| | | | | | | NO: 1020) | | |
| S37F_CTNNB1_30bp_C- | CTNNB1 | RESCUE | UCU | C/18 | S37F | GGUAGUGGCACCACAAUGG | 9.734 | 125B |
| flip_guide_30_13 | | | | | | AUUCCAGAGUCC (SEQ ID | | |
| | | | | | | NO: 1021) | | |
| T41I_CTNNB1_30bp_C- | CTNNB1 | RESCUE | ACC | C/24 | T41I | GGCUGUGCUAGUGGCACCA | 5.252 | 125B |
| flip_guide_30_7 | | | | | | GAAUGGAUUCCA (SEQ ID | | |
| | | | | | | NO: 1022) | | |
| T41I_CTNNB1_30bp_C- | CTNNB1 | RESCUE | ACC | C/22 | T41I | GGAGCUGUGCUAGUGGCAC | 12.765 | 125B |
| flip_guide_30_9 | | | | | | CAGAAUGGAUUC (SEQ ID | | |
| | | | | | | NO: 1023) | | |
| T41I_CTNNB1_30bp_C- | CTNNB1 | RESCUE | ACC | C/20 | T41I | GAGGAGCUGUGCUAGUGGC | 14.196 | 125B |
| flip_guide_30_11 | | | | | | ACCAGAAUGGAU (SEQ ID | | |
| | | | | | | NO: 1024) | | |
| T41I_CTNNB1_30bp_C- | CTNNB1 | RESCUE | ACC | C/18 | T41I | GGAAGGAGCUGUGCUAGUG | 11.364 | 125B |
| flip_guide_30_13 | | | | | | GCACCAGAAUGG (SEQ ID | | |
| | | | | | | NO: 1025) | | |
| P44L_CTNNB1_30bp_C- | CTNNB1 | RESCUE | CCU | C/24 | P44L | GAGAGAACGAGCUGUGGUA | 4.636 | 125B |
| flip_guide_30_7 | | | | | | GUGGCACCAGAA (SEQ ID | | |
| | | | | | | NO: 1026) | | |
| P44L_CTNNB1_30bp_C- | CTNNB1 | RESCUE | CCU | C/22 | P44L | GUCAGAGAACGAGCUGUGG | 8.413 | 125B |
| flip_guide_30_9 | | | | | | UAGUGGCACCAG (SEQ ID | | |
| | | | | | | NO: 1027) | | |
| P44L_CTNNB1_30bp_C- | CTNNB1 | RESCUE | CCU | C/20 | P44L | GACUCAGAGAACGAGCUGU | 8.276 | 125B |
| flip_guide_30_11 | | | | | | GGUAGUGGCACC (SEQ ID | | |
| | | | | | | NO: 1028) | | |
| P44L_CTNNB1_30bp_C- | CTNNB1 | RESCUE | CCU | C/18 | P44L | GCCACUCAGAGAACGAGCU | 1.775 | 125B |
| flip_guide_30_13 | | | | | | GUGGUAGUGGCA (SEQ ID | | |
| | | | | | | NO: 1029) | | |
| P445_CTNNB1_30bp_C- | CTNNB1 | RESCUE | UCU | C/24 | P44S | GGAGAAGCAGCUGUGGUAG | 15.256 | 125B |
| flip_guide_30_7 | | | | | | UGGCACCAGAAU (SEQ ID | | |
| | | | | | | NO: 1030) | | |
| P445_CTNNB1_30bp_C- | CTNNB1 | RESCUE | UCU | C/22 | P44S | GCAGAGAAGCAGCUGUGGU | 14.639 | 125B |
| flip_guide_30_9 | | | | | | AGUGGCACCAGA (SEQ ID | | |
| | | | | | | NO: 1031) | | |
| P445_CTNNB1_30bp_C- | CTNNB1 | RESCUE | UCU | C/20 | P44S | GCUCAGAGAAGCAGCUGUG | 13.489 | 125B |
| flip_guide_30_11 | | | | | | GUAGUGGCACCA (SEQ ID | | |
| | | | | | | NO: 1032) | | |
| P445_CTNNB1_30bp_C- | CTNNB1 | RESCUE | UCU | C/18 | P44S | GCACUCAGAGAAGCAGCUG | 13.906 | 125B |
| flip_guide_30_13 | | | | | | UGGUAGUGGCAC (SEQ ID | | |
| | | | | | | NO: 1033) | | |
| S45F_CTNNB1_30bp_C- | CTNNB1 | RESCUE | UCU | C/24 | S45F | GCUCAGACAAGGAGCUGUG | 6.550 | 125B |
| flip_guide_30_7 | | | | | | GUAGUGGCACCA (SEQ ID | | |
| | | | | | | NO: 1034) | | |
| S45F_CTNNB1_30bp_C- | CTNNB1 | RESCUE | UCU | C/22 | S45F | GCACUCAGACAAGGAGCUG | 8.816 | 125B |
| flip_guide_30_9 | | | | | | UGGUAGUGGCAC (SEQ ID | | |
| | | | | | | NO: 1035) | | |
| S45F_CTNNB1_30bp_C- | CTNNB1 | RESCUE | UCU | C/20 | S45F | GACCACUCAGACAAGGAGC | 11.980 | 125B |
| flip_guide_30_11 | | | | | | UGUGGUAGUGGC (SEQ ID | | |
| | | | | | | NO: 1036) | | |
| S45F_CTNNB1_30bp_C- | CTNNB1 | RESCUE | UCU | C/18 | S45F | GUUACCACUCAGACAAGGA | 7.397 | 125B |
| flip_guide_30_13 | | | | | | GCUGUGGUAGUG (SEQ ID | | |
| | | | | | | NO: 1037) | | |
| TCG_KRAS_30bp_C- | KRAS | RESCUE | UCG | C/24 | L56L | GUGUGUCCAGAAUAUCCAA | 13.024 | 125B |
| flip_guide_30_7 | | | | | | GAGACAGGUUUC (SEQ ID | | |
| | | | | | | NO: 1038) | | |
| TCG_KRAS_30bp_C- | KRAS | RESCUE | UCG | C/22 | L56L | GGCUGUGUCCAGAAUAUCC | 8.716 | 125B |
| flip_guide_30_9 | | | | | | AAGAGACAGGUU (SEQ ID | | |
| | | | | | | NO: 1039) | | |
| TCG_KRAS_30bp_C- | KRAS | RESCUE | UCG | C/20 | L56L | GCUGCUGUGUCCAGAAUAU | 10.067 | 125B |
| flip_guide_30_11 | | | | | | CCAAGAGACAGG (SEQ ID | | |
| | | | | | | NO: 1040) | | |
| TCG_KRAS_30bp_C- | KRAS | RESCUE | UCG | C/18 | L56L | GACCUGCUGUGUCCAGAAU | 6.656 | 125B |
| flip_guide_30_13 | | | | | | AUCCAAGAGACA (SEQ ID | | |
| | | | | | | NO: 1041) | | |
| ACG_KRAS_30bp_C- | KRAS | RESCUE | ACG | C/24 | D30D | GAUAUUCCUCCACAAAAUG | 13.954 | 125B |
| flip_guide_30_7 | | | | | | AUUCUGAAUUAG (SEQ ID | | |
| | | | | | | NO: 1042) | | |
| ACG_KRAS_30bp_C- | KRAS | RESCUE | ACG | C/22 | D30D | GUCAUAUUCCUCCACAAAA | 12.962 | 125B |
| flip_guide_30_9 | | | | | | UGAUUCUGAAUU (SEQ ID | | |
| | | | | | | NO: 1043) | | |
| ACG_KRA5_30bp_C- | KRAS | RESCUE | ACG | C/20 | D30D | GGAUCAUAUUCCUCCACAA | 23.138 | 125B |
| flip_guide_30_11 | | | | | | AAUGAUUCUGAA (SEQ ID | | |
| | | | | | | NO: 1044) | | |
| ACG_KRAS_30bp_C- | KRAS | RESCUE | ACG | C/18 | D30D | GUGGAUCAUAUUCCUCCAC | 16.629 | 125B |
| flip_guide_30_13 | | | | | | AAAAUGAUUCUG (SEQ ID | | |
| | | | | | | NO: 1045) | | |
| GCG_KRAS_30bp_C- | KRAS | RESCUE | GCG | C/24 | G13G | GGCCUACCCCACCAGCUCC | 0.394 | 125B |
| flip_guide_30_7 | | | | | | AACUACCACAAG (SEQ ID | | |
| | | | | | | NO: 1046) | | |
| GCG_KRAS_30bp_C- | KRAS | RESCUE | GCG | C/22 | G13G | GUUGCCUACCCCACCAGCU | 0.886 | 125B |
| flip_guide_30_9 | | | | | | CCAACUACCACA (SEQ ID | | |
| | | | | | | NO: 1047) | | |
| GCG_KRAS_30bp_C- | KRAS | RESCUE | GCG | C/20 | G13G | GUCUUGCCUACCCCACCAG | 0.950 | 125B |
| flip_guide_30_11 | | | | | | CUCCAACUACCA (SEQ ID | | |
| | | | | | | NO: 1048) | | |
| GCG_KRAS_30bp_C- | KRAS | RESCUE | GCG | C/18 | G13G | GACUCUUGCCUACCCCACC | 0.311 | 125B |
| flip_guide_30_13 | | | | | | AGCUCCAACUAC (SEQ ID | | |
| | | | | | | NO: 1049) | | |
| CCT_KRAS_30bp_C- | KRAS | RESCUE | CCU | C/24 | A18A | GCGUCAACGCACUCUUGCC | 1.407 | 125B |
| flip_guide_30_7 | | | | | | UACGCCACCAGC (SEQ ID | | |
| | | | | | | NO: 1050) | | |
| CCT_KRAS_30bp_C- | KRAS | RESCUE | CCU | C/22 | A18A | GAUCGUCAACGCACUCUUG | 5.431 | 125B |
| flip_guide_30_9 | | | | | | CCUACGCCACCA (SEQ ID | | |
| | | | | | | NO: 1051) | | |
| CCT_KRAS_30bp_C- | KRAS | RESCUE | CCU | C/20 | A18A | GGUAUCGUCAACGCACUCU | 7.769 | 125B |
| flip_guide_30_11 | | | | | | UGCCUACGCCAC (SEQ ID | | |
| | | | | | | NO: 1052) | | |
| CCT_KRAS_30bp_C- | KRAS | RESCUE | CCU | C/18 | A18A | GCUGUAUCGUCAACGCACU | 1.685 | 125B |
| flip_guide_30_13 | | | | | | CUUGCCUACGCC (SEQ ID | | |
| | | | | | | NO: 1053) | | |
| TCG_PPIB_30bp_C- | PPIB | RESCUE | UCG | C/24 | I18I | GCCCCGCCAUGAGGGCGGC | 4.128 | 125B |
| flip_guide_30_7 | | | | | | GGCAAGGAGCAC (SEQ ID | | |
| | | | | | | NO: 1054) | | |
| TCG_PP1B_30bp_C- | PPIB | RESCUE | UCG | C/22 | I18I | GGACCCCGCCAUGAGGGCG | 6.324 | 125B |
| flip_guide_30_9 | | | | | | GCGGCAAGGAGC (SEQ ID | | |
| | | | | | | NO: 1055) | | |
| TCG_PPIB_30bp_C- | PPIB | RESCUE | UCG | C/20 | I18I | GCGGACCCCGCCAUGAGGG | 6.386 | 125B |
| flip_guide_30_11 | | | | | | CGGCGGCAAGGA (SEQ ID | | |
| | | | | | | NO: 1056) | | |
| TCG_PPIB_30bp_C- | PPIB | RESCUE | UCG | C/18 | I18I | GGACGGACCCCGCCAUGAG | 5.348 | 125B |
| flip_guide_30_13 | | | | | | GGCGGCGGCAAG (SEQ ID | | |
| | | | | | | NO: 1057) | | |
| ACG_PPIB_30bp_C- | PPIB | RESCUE | ACG | C/24 | R7C | GUGUUGCCUUCGGAGAGGC | 28.575 | 125B |
| flip_guide_30_7 | | | | | | GCAGCAUCCACA (SEQ ID | | |
| | | | | | | NO: 1058) | | |
| ACG_PPIB_30bp_C- | PPIB | RESCUE | ACG | C/22 | R7C | GCAUGUUGCCUUCGGAGAG | 24.992 | 125B |
| flip_guide_30_9 | | | | | | GCGCAGCAUCCA (SEQ ID | | |
| | | | | | | NO: 1059) | | |
| ACG_PPIB_30bp_C- | PPIB | RESCUE | ACG | C/20 | R7C | GUUCAUGUUGCCUUCGGAG | 24.160 | 125B |
| flip_guide_30_11 | | | | | | AGGCGCAGCAUC (SEQ ID | | |
| | | | | | | NO: 1060) | | |
| ACG_PPIB_30bp_C- | PPIB | RESCUE | ACG | C/18 | R7C | GCCUUCAUGUUGCCUUCGG | 5.582 | 125B |
| flip_guide_30_13 | | | | | | AGAGGCGCAGCA (SEQ ID | | |
| | | | | | | NO: 1061) | | |
| GCG_PPIB_30bp_C- | PPIB | RESCUE | GCG | C/24 | A19V | GGACCCCCCGAUGAGGGCG | 0.584 | 125B |
| flip_guide_30_7 | | | | | | GCGGCAAGGAGC (SEQ ID | | |
| | | | | | | NO: 1062) | | |
| GCG_PPIB_30bp_C- | PPIB | RESCUE | GCG | C/22 | A19V | GCGGACCCCCCGAUGAGGG | 5.708 | 125B |
| flip_guide_30_9 | | | | | | CGGCGGCAAGGA (SEQ ID | | |
| | | | | | | NO: 1063) | | |
| GCG_PPIB_30bp_C- | PPIB | RESCUE | GCG | C/20 | A19V | GGACGGACCCCCCGAUGAG | 3.700 | 125B |
| flip_guide_30_11 | | | | | | GGCGGCGGCAAG (SEQ ID | | |
| | | | | | | NO: 1064) | | |
| GCG_PPIB_30bp_C- | PPIB | RESCUE | GCG | C/18 | A19V | GAAGACGGACCCCCCGAUG | 0.667 | 125B |
| flip_guide_30_13 | | | | | | AGGGCGGCGGCA (SEQ ID | | |
| | | | | | | NO: 1065) | | |
| CCG_PPIB_30bp_C- | PPIB | RESCUE | CCG | C/24 | S21S | GGAAGACCGACCCCGCGAU | 3.719 | 125B |
| flip_guide_30_7 | | | | | | GAGGGCGGCGGC (SEQ ID | | |
| | | | | | | NO: 1066) | | |
| CCG_PPIB_30bp_C- | PPIB | RESCUE | CCG | C/22 | S21S | GAAGAAGACCGACCCCGCG | 4.255 | 125B |
| flip_guide_30_9 | | | | | | AUGAGGGCGGCG (SEQ ID | | |
| | | | | | | NO: 1067) | | |
| CCG_PPIB_30bp_C- | PPIB | RESCUE | CCG | C/20 | S21S | GGGAAGAAGACCGACCCCG | 6.843 | 125B |
| flip_guide_30_11 | | | | | | CGAUGAGGGCGG (SEQ ID | | |
| | | | | | | NO: 1068) | | |
| CCG_PPIB_30bp_C- | PPIB | RESCUE | CCG | C/18 | S21S | GCAGGAAGAAGACCGACCC | 4.263 | 125B |
| flip_guide_30_13 | | | | | | CGCGAUGAGGGC (SEQ ID | | |
| | | | | | | NO: 1069) | | |
| TCG_SMARCA4_30bp_C- | SMARCA4 | RESCUE | UCG | C/24 | S85L | GUCGUCCCACAUGCCCUUC | 4.081 | 125B |
| flip_guide_30_7 | | | | | | UCAUGCAUGGAC (SEQ ID | | |
| | | | | | | NO: 1070) | | |
| TCG_SMARCA4_30bp_C- | SMARCA4 | RESCUE | UCG | C/22 | S85L | GGGUCGUCCCACAUGCCCU | 3.132 | 125B |
| flip_guide_30_9 | | | | | | UCUCAUGCAUGG (SEQ ID | | |
| | | | | | | NO: 1071) | | |
| TCG_SMARCA4_30bp_C- | SMARCA4 | RESCUE | UCG | C/20 | S85L | GCGGGUCGUCCCACAUGCC | 0.918 | 125B |
| flip_guide_30_11 | | | | | | CUUCUCAUGCAU (SEQ ID | | |
| | | | | | | NO: 1072) | | |
| TCG_SMARCA4_30bp_C- | SMARCA4 | RESCUE | UCG | C/18 | S85L | GCGCGGGUCGUCCCACAUG | 1.830 | 125B |
| flip_guide_30_13 | | | | | | CCCUUCUCAUGC (SEQ ID | | |
| | | | | | | NO: 1073) | | |
| ACG_SMARCA4_30bp_C- | SMARCA4 | RESCUE | ACG | C/24 | D86D | GCGGGUCCUCCGACAUGCC | 2.425 | 125B |
| flip_guide_30_7 | | | | | | CUUCUCAUGCAU (SEQ ID | | |
| | | | | | | NO: 1074) | | |
| ACG_SMARCA4_30bp_C- | SMARCA4 | RESCUE | ACG | C/22 | D86D | GCGCGGGUCCUCCGACAUG | 3.392 | 125B |
| flip_guide_30_9 | | | | | | CCCUUCUCAUGC (SEQ ID | | |
| | | | | | | NO: 1075) | | |
| ACG_SMARCA4_30bp_C- | SMARCA4 | RESCUE | ACG | C/20 | D86D | GAGCGCGGGUCCUCCGACA | 4.485 | 125B |
| flip_guide_30_11 | | | | | | UGCCCUUCUCAU (SEQ ID | | |
| | | | | | | NO: 1076) | | |
| ACG_SMARCA4_30bp_C- | SMARCA4 | RESCUE | ACG | C/18 | D86D | GGUAGCGCGGGUCCUCCGA | 3.071 | 125B |
| flip_guide_30_13 | | | | | | CAUGCCCUUCUC (SEQ ID | | |
| | | | | | | NO: 1077) | | |
| GCG_SMARCA4_30bp_C- | SMARCA4 | RESCUE | GCG | C/24 | R89C | GUGUAGCCCGGGUCGUCCG | 0.225 | 125B |
| flip_guide_30_7 | | | | | | ACAUGCCCUUCU (SEQ ID | | |
| | | | | | | NO: 1078) | | |
| GCG_SMARCA4_30bp_C- | SMARCA4 | RESCUE | GCG | C/22 | R89C | GGUUGUAGCCCGGGUCGUC | 1.026 | 125B |
| flip_guide_30_9 | | | | | | CGACAUGCCCUU (SEQ ID | | |
| | | | | | | NO: 1079) | | |
| GCG_SMARCA4_30bp_C- | SMARCA4 | RESCUE | GCG | C/20 | R89C | GUGGUUGUAGCCCGGGUCG | 1.737 | 125B |
| flip_guide_30_11 | | | | | | UCCGACAUGCCC (SEQ ID | | |
| | | | | | | NO: 1080) | | |
| GCG_SMARCA4_30bp_C- | SMARCA4 | RESCUE | GCG | C/18 | R89C | GUCUGGUUGUAGCCCGGGU | 0.603 | 125B |
| flip_guide_30_13 | | | | | | CGUCCGACAUGC (SEQ ID | | |
| | | | | | | NO: 1081) | | |
| CCG_SMARCA4_30bp_C- | SMARCA4 | RESCUE | CCG | C/24 | P88L | GUAGCGCCGGUCGUCCGAC | 2.895 | 125B |
| flip_guide_30_7 | | | | | | AUGCCCUUCUCA (SEQ ID | | |
| | | | | | | NO: 1082) | | |
| CCG_SMARCA4_30bp_C- | SMARCA4 | RESCUE | CCG | C/22 | P88L | GUGUAGCGCCGGUCGUCCG | 2.766 | 125B |
| flip_guide_30_9 | | | | | | ACAUGCCCUUCU (SEQ ID | | |
| | | | | | | NO: 1083) | | |
| CCG_SMARCA4_30bp_C- | SMARCA4 | RESCUE | CCG | C/20 | P88L | GGUUGUAGCGCCGGUCGUC | 4.845 | 125B |
| flip_guide_30_11 | | | | | | CGACAUGCCCUU (SEQ ID | | |
| | | | | | | NO: 1084) | | |
| CCG_SMARCA4_30bp_C- | SMARCA4 | RESCUE | CCG | C/18 | P88L | GUGGUUGUAGCGCCGGUCG | 0.684 | 125B |
| flip_guide_30_13 | | | | | | UCCGACAUGCCC (SEQ ID | | |
| | | | | | | NO: 1085) | | |
| NRAS_30bp_C- | NRAS | RESCUE | UCC | C/28 | I21I | GUGCAUUGUCAGUGCGCUU | 2.714 | 125C |
| flip_guide_30_3 | | | | | | UUCCCAACACCA (SEQ ID | | |
| | | | | | | NO: 1086) | | |
| NRAS_30bp_C- | NRAS | RESCUE | UCC | C/26 | I21I | GGCUGCAUUGUCAGUGCGC | 8.839 | 125C |
| flip_guide_30_5 | | | | | | UUUUCCCAACAC (SEQ ID | | |
| | | | | | | NO: 1087) | | |
| NRAS_30bp_C- | NRAS | RESCUE | UCC | C/24 | I21I | GUAGCUGCAUUGUCAGUGC | 10.690 | 125C |
| flip_guide_30_7 | | | | | | GCUUUUCCCAAC (SEQ ID | | |
| | | | | | | NO: 1088) | | |
| NRAS_30bp_C- | NRAS | RESCUE | UCC | C/22 | I21I | GAUUAGCUGCAUUGUCAGU | 13.278 | 125C |
| flip_guide_30_9 | | | | | | GCGCUUUUCCCA (SEQ ID | | |
| | | | | | | NO: 1089) | | |
| NRAS_30bp_C- | NRAS | RESCUE | UCC | C/20 | I21I | GGGAUUAGCUGCAUUGUCA | 18.858 | 125C |
| flip_guide_30_11 | | | | | | GUGCGCUUUUCC (SEQ ID | | |
| | | | | | | NO: 1090) | | |
| NKFB1_30bp_C- | NKFB1 | RESCUE | ACC | C/28 | P33S | GUGCUUGAAAUACUUCUGG | 16.138 | 125C |
| flip_guide_30_3 | | | | | | AUUAAAUAUUGU (SEQ ID | | |
| | | | | | | NO: 1091) | | |
| NKFB1_30bp_C- | NKFB1 | RESCUE | ACC | C/26 | P33S | GUGUGCUUGAAAUACUUCU | 9.580 | 125C |
| flip_guide_30_5 | | | | | | GGAUUAAAUAUU (SEQ ID | | |
| | | | | | | NO: 1092) | | |
| NKFB1_30bp_C- | NKFB1 | RESCUE | ACC | C/24 | P33S | GUCUGUGCUUGAAAUACUU | 14.701 | 125C |
| flip_guide_30_7 | | | | | | CUGGAUUAAAUA (SEQ ID | | |
| | | | | | | NO: 1093) | | |
| NKFB1_30bp_C- | NKFB1 | RESCUE | ACC | C/22 | P33S | GCAUCUGUGCUUGAAAUAC | 13.808 | 125C |
| flip_guide_30_9 | | | | | | UUCUGGAUUAAA (SEQ ID | | |
| | | | | | | NO: 1094) | | |
| NKFB1_30bp_C- | NKFB1 | RESCUE | ACC | C/20 | P33S | GGCCAUCUGUGCUUGAAAU | 21.529 | 125C |
| flip_guide_30_11 | | | | | | ACUUCUGGAUUA (SEQ ID | | |
| | | | | | | NO: 1095) | | |
| EZH2_30bp_C- | EZH2 | RESCUE | UCA | C/28 | F32F | GCUCAACCUCUUGAGCUGU | 2.696 | 125C |
| flip_guide_30_3 | | | | | | CUCAGUCGCAUG (SEQ ID | | |
| | | | | | | NO: 1096) | | |
| EZH2_30bp_C- | EZH2 | RESCUE | UCA | C/26 | F32F | GGUCUCAACCUCUUGAGCU | 0.106 | 125C |
| flip_guide_30_5 | | | | | | GUCUCAGUCGCA (SEQ ID | | |
| | | | | | | NO: 1097) | | |
| EZH2_30bp_C- | EZH2 | RESCUE | UCA | C/24 | F32F | GUCGUCUCAACCUCUUGAG | 11.539 | 125C |
| flip_guide_30_7 | | | | | | CUGUCUCAGUCG (SEQ ID | | |
| | | | | | | NO: 1098) | | |
| EZH2_30bp_C- | EZH2 | RESCUE | UCA | C/22 | F32F | GGCUCGUCUCAACCUCUUG | 10.710 | 125C |
| flip_guide_30_9 | | | | | | AGCUGUCUCAGU (SEQ ID | | |
| | | | | | | NO: 1099) | | |
| EZH2_30bp_C- | EZH2 | RESCUE | UCA | C/20 | F32F | GCAGCUCGUCUCAACCUCU | 15.855 | 125C |
| flip_guide_30_11 | | | | | | UGAGCUGUCUCA (SEQ ID | | |
| | | | | | | NO: 1100) | | |
| NF2_30bp_C- | NF2 | RESCUE | ACG | C/28 | T21M | GACCUCUUGGGUUGCUUCC | 8.318 | 125C |
| flip_guide_30_3 | | | | | | UCUUGAGAGAGC (SEQ ID | | |
| | | | | | | NO: 1101) | | |
| NF2_30bp_C- | NF2 | RESCUE | ACG | C/26 | T21M | GGAACCUCUUGGGUUGCUU | 18.846 | 125C |
| flip_guide_30_5 | | | | | | CCUCUUGAGAGA (SEQ ID | | |
| | | | | | | NO: 1102) | | |
| NF2_30bp_C- | NF2 | RESCUE | ACG | C/24 | T21M | GGUGAACCUCUUGGGUUGC | 18.617 | 125C |
| flip_guide_30_7 | | | | | | UUCCUCUUGAGA (SEQ ID | | |
| | | | | | | NO: 1103) | | |
| NF2_30bp_C- | NF2 | RESCUE | ACG | C/22 | T21M | GCGGUGAACCUCUUGGGUU | 24.904 | 125C |
| flip_guide_30_9 | | | | | | GCUUCCUCUUGA (SEQ ID | | |
| | | | | | | NO: 1104) | | |
| NF2_30bp_C- | NF2 | RESCUE | ACG | C/20 | T21M | GCACGGUGAACCUCUUGGG | 14.735 | 125C |
| flip_guide_30_11 | | | | | | UUGCUUCCUCUU (SEQ ID | | |
| | | | | | | NO: 1105) | | |
| RAF1_30bp_C- | RAF1 | RESCUE | UCC | C/28 | P30S | GAGCAGAGAUGCAGCUGGA | 8.257 | 125C |
| flip_guide_30_3 | | | | | | GCCAUCAAACAC (SEQ ID | | |
| | | | | | | NO: 1106) | | |
| RAF1_30bp_C- | RAF1 | RESCUE | UCC | C/26 | P30S | GGUAGCAGAGAUGCAGCUG | 14.435 | 125C |
| flip_guide_30_5 | | | | | | GAGCCAUCAAAC (SEQ ID | | |
| | | | | | | NO: 1107) | | |
| RAF1_30bp_C- | RAF1 | RESCUE | UCC | C/24 | P30S | GUUGUAGCAGAGAUGCAGC | 20.867 | 125C |
| flip_guide_30_7 | | | | | | UGGAGCCAUCAA (SEQ ID | | |
| | | | | | | NO: 1108) | | |
| RAF1_30bp_C- | RAF1 | RESCUE | UCC | C/22 | P30S | GUAUUGUAGCAGAGAUGCA | 13.821 | 125C |
| flip_guide_30_9 | | | | | | GCUGGAGCCAUC (SEQ ID | | |
| | | | | | | NO: 1109) | | |
| RAF1_30bp_C- | RAF1 | RESCUE | UCC | C/20 | P30S | GACUAUUGUAGCAGAGAUG | 16.277 | 125C |
| flip_guide_30_11 | | | | | | CAGCUGGAGCCA (SEQ ID | | |
| | | | | | | NO: 1110) | | |
| NRAS_30bp_U- | NRAS | RESCUE | UCC | U/28 | I21I | GUGUAUUGUCAGUGCGCUU | 3.500 | 125C |
| flip_guide_30_3 | | | | | | UUCCCAACACCA (SEQ ID | | |
| | | | | | | NO: 1111) | | |
| NRAS_30bp_U- | NRAS | RESCUE | UCC | U/26 | I21I | GGCUGUAUUGUCAGUGCGC | 8.805 | 125C |
| flip_guide_30_5 | | | | | | UUUUCCCAACAC (SEQ ID | | |
| | | | | | | NO: 1112) | | |
| NRAS_30bp_U- | NRAS | RESCUE | UCC | U/24 | I21I | GUAGCUGUAUUGUCAGUGC | 12.296 | 125C |
| flip_guide_30_7 | | | | | | GCUUUUCCCAAC (SEQ ID | | |
| | | | | | | NO: 1113) | | |
| NRAS_30bp_U- | NRAS | RESCUE | UCC | U/22 | I21I | GAUUAGCUGUAUUGUCAGU | 12.521 | 125C |
| flip_guide_30_9 | | | | | | GCGCUUUUCCCA (SEQ ID | | |
| | | | | | | NO: 1114) | | |
| NRAS_30bp_U- | NRAS | RESCUE | UCC | U/20 | I21I | GGGAUUAGCUGUAUUGUCA | 18.399 | 125C |
| flip_guide_30_11 | | | | | | GUGCGCUUUUCC (SEQ ID | | |
| | | | | | | NO: 1115) | | |
| NKFB1_30bp_U- | NKFB1 | RESCUE | ACC | U/28 | P33S | GUGUUUGAAAUACUUCUGG | 14.277 | 125C |
| flip_guide_30_3 | | | | | | AUUAAAUAUUGU (SEQ ID | | |
| | | | | | | NO: 1116) | | |
| NKFB1_30bp_U- | NKFB1 | RESCUE | ACC | U/26 | P33S | GUGUGUUUGAAAUACUUCU | 10.928 | 125C |
| flip_guide_30_5 | | | | | | GGAUUAAAUAUU (SEQ ID | | |
| | | | | | | NO: 1117) | | |
| NKFB1_30bp_U- | NKFB1 | RESCUE | ACC | U/24 | P33S | GUCUGUGUUUGAAAUACUU | 18.012 | 125C |
| flip_guide_30_7 | | | | | | CUGGAUUAAAUA (SEQ ID | | |
| | | | | | | NO: 1118) | | |
| NKFB1_30bp_U- | NKFB1 | RESCUE | ACC | U/22 | P33S | GCAUCUGUGUUUGAAAUAC | 21.468 | 125C |
| flip_guide_30_9 | | | | | | UUCUGGAUUAAA (SEQ ID | | |
| | | | | | | NO: 1119) | | |
| NKFB1_30bp_U- | NKFB1 | RESCUE | ACC | U/20 | P33S | GGCCAUCUGUGUUUGAAAU | 24.376 | 125C |
| flip_guide_30_11 | | | | | | ACUUCUGGAUUA (SEQ ID | | |
| | | | | | | NO: 1120) | | |
| EZH2_30bp_U- | EZH2 | RESCUE | UCA | U/28 | F32F | GCUUAACCUCUUGAGCUGU | 9.307 | 125C |
| flip_guide_30_3 | | | | | | CUCAGUCGCAUG (SEQ ID | | |
| | | | | | | NO: 1121) | | |
| EZH2_30bp_U- | EZH2 | RESCUE | UCA | U/26 | F32F | GGUCUUAACCUCUUGAGCU | 9.393 | 125C |
| flip_guide_30_5 | | | | | | GUCUCAGUCGCA (SEQ ID | | |
| | | | | | | NO: 1122) | | |
| EZH2_30bp_U- | EZH2 | RESCUE | UCA | U/24 | F32F | GUCGUCUUAACCUCUUGAG | 8.525 | 125C |
| flip_guide_30_7 | | | | | | CUGUCUCAGUCG (SEQ ID | | |
| | | | | | | NO: 1123) | | |
| EZH2_30bp_U- | EZH2 | RESCUE | UCA | U/22 | F32F | GGCUCGUCUUAACCUCUUG | 6.976 | 125C |
| flip_guide_30_9 | | | | | | AGCUGUCUCAGU (SEQ ID | | |
| | | | | | | NO: 1124) | | |
| EZH2_30bp_U- | EZH2 | RESCUE | UCA | U/20 | F32F | GCAGCUCGUCUUAACCUCU | 9.534 | 125C |
| flip_guide_30_11 | | | | | | UGAGCUGUCUCA (SEQ ID | | |
| | | | | | | NO: 1125) | | |
| NF2_30bp_U- | NF2 | RESCUE | ACG | U/28 | T21M | GACUUCUUGGGUUGCUUCC | 7.253 | 125C |
| flip_guide_30_3 | | | | | | UCUUGAGAGAGC (SEQ ID | | |
| | | | | | | NO: 1126) | | |
| NF2_30bp_U- | NF2 | RESCUE | ACG | U/26 | T21M | GGAACUUCUUGGGUUGCUU | 16.618 | 125C |
| flip_guide_30_5 | | | | | | CCUCUUGAGAGA (SEQ ID | | |
| | | | | | | NO: 1127) | | |
| NF2_30bp_U- | NF2 | RESCUE | ACG | U/24 | T21M | GGUGAACUUCUUGGGUUGC | 15.696 | 125C |
| flip_guide_30_7 | | | | | | UUCCUCUUGAGA (SEQ ID | | |
| | | | | | | NO: 1128) | | |
| NF2_30bp_U- | NF2 | RESCUE | ACG | U/22 | T21M | GCGGUGAACUUCUUGGGUU | 18.984 | 125C |
| flip_guide_30_9 | | | | | | GCUUCCUCUUGA (SEQ ID | | |
| | | | | | | NO: 1129) | | |
| NF2_30bp_U- | NF2 | RESCUE | ACG | U/20 | T21M | GCACGGUGAACUUCUUGGG | 16.393 | 125C |
| flip_guide_30_11 | | | | | | UUGCUUCCUCUU (SEQ ID | | |
| | | | | | | NO: 1130) | | |
| RAF1_30bp_U- | RAF1 | RESCUE | UCC | U/28 | P30S | GAGUAGAGAUGCAGCUGGA | 9.450 | 125C |
| flip_guide_30_3 | | | | | | GCCAUCAAACAC (SEQ ID | | |
| | | | | | | NO: 1131) | | |
| RAF1_30bp_U- | RAF1 | RESCUE | UCC | U/26 | P30S | GGUAGUAGAGAUGCAGCUG | 15.056 | 125C |
| flip_guide_30_5 | | | | | | GAGCCAUCAAAC (SEQ ID | | |
| | | | | | | NO: 1132) | | |
| RAF1_30bp_U- | RAF1 | RESCUE | UCC | U/24 | P30S | GUUGUAGUAGAGAUGCAGC | 20.868 | 125C |
| flip_guide_30_7 | | | | | | UGGAGCCAUCAA (SEQ ID | | |
| | | | | | | NO: 1133) | | |
| RAF1_30bp_U- | RAF1 | RESCUE | UCC | U/22 | P30S | GUAUUGUAGUAGAGAUGCA | 15.518 | 125C |
| flip_guide_30_9 | | | | | | GCUGGAGCCAUC (SEQ ID | | |
| | | | | | | NO: 1134) | | |
| RAF1_30bp_U- | RAF1 | RESCUE | UCC | U/20 | P30S | GACUAUUGUAGUAGAGAUG | 20.003 | 125C |
| flip_guide_30_11 | | | | | | CAGCUGGAGCCA (SEQ ID | | |
| | | | | | | NO: 1135) | | |
| STAT3 S727 C-flip | STAT3 | RESCUE | UCC | C/22 | S727F | GUGCGGGGGCACAUCGGCA | 6.127 | 129B |
| | | | | | | GGUCAAUGGUAU (SEQ ID | | |
| | | | | | | NO: 1136) | | |
| STAT3 S727 U-flip | STAT3 | RESCUE | UCC | U/22 | S727F | GUGCGGGGGUACAUCGGCA | 3.132 | 129B |
| | | | | | | GGUCAAUGGUAU (SEQ ID | | |
| | | | | | | NO: 1137) | | |
| STAT3 S727 G-flip | STAT3 | RESCUE | UCC | G/22 | S727F | GUGCGGGGGGACAUCGGCA | 0.154 | 129B |
| | | | | | | GGUCAAUGGUAU (SEQ ID | | |
| | | | | | | NO: 1138) | | |
| STAT3 S727 A-flip | STAT3 | RESCUE | UCC | A/22 | S727F | GUGCGGGGGAACAUCGGCA | 0.156 | 129B |
| | | | | | | GGUCAAUGGUAU (SEQ ID | | |
| | | | | | | NO: 1139) | | |
| STAT1 S727 C-flip | STAT1 | RESCUE | UCC | C/22 | S727F | GCCUCAGGACACAUGGGGA | 1.141 | 129D |
| | | | | | | GCAGGUUGUCUG (SEQ ID | | |
| | | | | | | NO: 1140) | | |
| STAT1 S727 U-flip | STAT1 | RESCUE | UCC | U/22 | S727F | GCCUCAGGAUACAUGGGGA | 0.801 | 129D |
| | | | | | | GCAGGUUGUCUG (SEQ ID | | |
| | | | | | | NO: 1141) | | |
| STAT1 S727 G-flip | STAT1 | RESCUE | UCC | G/22 | S727F | GCCUCAGGAGACAUGGGGA | 0.223 | 129D |
| | | | | | | GCAGGUUGUCUG (SEQ ID | | |
| | | | | | | NO: 1142) | | |
| STAT1 S727 A-flip | STAT1 | RESCUE | UCC | A/22 | S727F | GCCUCAGGAAACAUGGGGA | 0.193 | 129D |
| | | | | | | GCAGGUUGUCUG (SEQ ID | | |
| | | | | | | NO: 1143) | | |
| STAT1 Y701 C-flip | STAT1 | REPAIR | UAU | C/34 | Y701C | GCAACUCAGUCUUGAUACA | 1.289 | 129E |
| | | | | | | UCCAGUUCCUUUAGGGCCA | | |
| | | | | | | UCAAGUUCCAUUG (SEQ ID | | |
| | | | | | | NO: 1144) | | |
| STAT1 Y701 U-flip | STAT1 | REPAIR | UAU | U/34 | Y701C | GCAACUCAGUCUUGAUAUA | 0.050 | 129E |
| | | | | | | UCCAGUUCCUUUAGGGCCA | | |
| | | | | | | UCAAGUUCCAUUG (SEQ ID | | |
| | | | | | | NO: 1145) | | |
| STAT1 Y701 G-flip | STAT1 | REPAIR | UAU | G/34 | Y701C | GCAACUCAGUCUUGAUAGA | 0.011 | 129E |
| | | | | | | UCCAGUUCCUUUAGGGCCA | | |
| | | | | | | UCAAGUUCCAUUG (SEQ ID | | |
| | | | | | | NO: 1146) | | |
| STAT3 Y705 C-flip | STAT3 | REPAIR | UAC | C/34 | Y705C | GAAACUUGGUCUUCAGGCA | 5.080 | 139B |
| | | | | | | UGGGGCAGCGCUACCUGGG | | |
| | | | | | | UCAGCUUCAGGAU (SEQ ID | | |
| | | | | | | NO: 1147) | | |
| STAT3_S727_30_5 | STAT3 | RESCUE | UCC | C/26 | S727F | GGGGGACAUCGGCAGGUCA | 4.842 | 139C |
| | | | | | | AUGGUAUUGCU (SEQ ID | | |
| | | | | | | NO: 1148) | | |
| STAT3_S727_30_7 | STAT3 | RESCUE | UCC | C/24 | S727F | CGGGGGGACAUCGGCAGGU | 2.990 | 139C |
| | | | | | | CAAUGGUAUUG (SEQ ID | | |
| | | | | | | NO: 1149) | | |
| STAT3_S727_30_11 | STAT3 | RESCUE | UCC | C/20 | S727F | AGUGCGGGGGGACAUCGGC | 6.786 | 139C |
| | | | | | | AGGUCAAUGGU (SEQ ID | | |
| | | | | | | NO: 1150) | | |
| STAT1_S727_30_5 | STAT1 | RESCUE | UCC | C/26 | S727F | AGGAGACAUGGGGAGCAGG | 2.128 | 139C |
| | | | | | | UUGUCUGUGGU (SEQ ID | | |
| | | | | | | NO: 1151) | | |
| STAT1_S727_30_7 | STAT1 | RESCUE | UCC | C/24 | S727F | UCAGGAGACAUGGGGAGCA | 3.215 | 139C |
| | | | | | | GGUUGUCUGUG (SEQ ID | | |
| | | | | | | NO: 1152) | | |
| STAT1_S727_30_11 | STAT1 | RESCUE | UCC | C/20 | S727F | CUCCUCAGGAGACAUGGGG | 2.146 | 139C |
| | | | | | | AGCAGGUUGUC (SEQ ID | | |
| | | | | | | NO: 1153) | | |

TABLE 31
Guide sequences used for synthetic target editing

| | | | | | | | Editing | |
|---|---|---|---|---|---|---|---|---|
| | | | | Base | | | percent- | |
| | Target- | | | flip/ | | | age | |
| | ed | REPAIR/ | | posi- | Codon | | (first | First |
| Name | gene | RESCUE | Motif | tion | change | Spacer sequence | figure) | figure |
| NM_000016.5_C- | ACADM | RESCUE | ACA | C/7 | H67Y | GUAUCAUCUUCUGCAGCC | 7.500 | 127A |
| flip_guide | | | | | | ACUGGGAUGAUUU (SEQ | | |
| | | | | | | ID NO: 1154) | | |
| NM_000018.3_C- | ACADVL | RESCUE | GCG | C/9 | A283V | GUCUCCACCCCAAAAGCU | 6.274 | 127A |
| flip_guide | | | | | | GUGAUCUUCUCCU (SEQ | | |
| | | | | | | ID NO: 1155) | | |
| NM_000071.2_C- | CBS | RESCUE | GCG | C/9 | R109C | GGAACUCACCCUUGGCCA | 6.140 | 127A |
| flip_guide | | | | | | AGAGCUCACACUU (SEQ | | |
| | | | | | | ID NO: 1156) | | |
| NM_000138.4_C- | FBN1 | RESCUE | GCG | C/5 | R1408C | GGAGCCCUCAUCAAGGUC | 13.751 | 127A |
| flip_guide | | | | | | UGUACAAGUGAAG (SEQ | | |
| | | | | | | ID NO: 1157) | | |
| NM_000141.4_C- | FGFR2 | RESCUE | CCC | C/7 | P267S | GCUGUGGCGGCAUUUGCC | 16.131 | 127A |
| flip_guide | | | | | | GGCAGUCCGGCUU (SEQ | | |
| | | | | | | ID NO: 1158) | | |
| NM_000152.4_C- | GAA | RESCUE | CCC | C/7 | P552L | GGCCUGGCGGGUCCCCCC | 2.644 | 127A |
| flip_guide | | | | | | AACCACCCCAGGC (SEQ | | |
| | | | | | | ID NO: 1159) | | |
| NM_000341.3_C- | SLC3A1 | RESCUE | ACG | C/7 | T467M | GAGAAGCCUGUUCAUCAC | 28.198 | 127A |
| flip_guide | | | | | | GUUGACAUACUGA (SEQ | | |
| | | | | | | ID NO: 1160) | | |
| NM_000375.2_C- | UROS | RESCUE | ACG | C/9 | R73C | GCUCCAAACCUAACUCUG | 13.632 | 127A |
| flip_guide | | | | | | CUGCUUCCACUGC (SEQ | | |
| | | | | | | ID NO: 1161) | | |
| NM_000431.3_C- | MVK | RESCUE | ACA | C/9 | T268I | GUGGCAUCUCUUGAGGUC | 13.775 | 127A |
| flip_guide | | | | | | AGGAGGGGGGCCA (SEQ | | |
| | | | | | | ID NO: 1162) | | |
| NM_000551.3_C- | VHL | RESCUE | CCG | C/7 | P158L | GUCUUUCCGAGUAUACAC | 22.466 | 127A |
| flip_guide | | | | | | UGGCAGUGUGAUA (SEQ | | |
| | | | | | | ID NO: 1163) | | |
| NM_001256850.1_C- | TTN | RESCUE | ACG | C/9 | R30071C | GCUUUCCACCUGGGCCAG | 23.207 | 127A |
| flip_guide | | | | | | GGGAAUCAAGCAC (SEQ | | |
| | | | | | | ID NO: 1164) | | |
| NM_002397.4_C- | MEF2C | RESCUE | ACG | C/9 | T1M | GUUCUCCCCCUAGUCCCC | 2.313 | 127A |
| flip_guide | | | | | | GUUUUUCUUCUCU (SEQ | | |
| | | | | | | ID NO: 1165) | | |
| NM_002474.2_C- | MYH11 | RESCUE | CCG | C/9 | P1264L | GUGGACUGCCGCUCCUGC | 34.770 | 127A |
| flip_guide | | | | | | ACCUGCGCCUCCA (SEQ | | |
| | | | | | | ID NO: 1166) | | |
| NM_002834.4_C- | PTPN11 | RESCUE | CCU | C/9 | L285F | GAUGAUCAACGGGCAGGA | 0.711 | 127A |
| flip_guide | | | | | | UGUUUUUAUAUCU (SEQ | | |
| | | | | | | ID NO: 1167) | | |
| NM_004004.5_C- | GJB2 | RESCUE | ACG | C/5 | R77W | GGCCCCUAGCCGGAUGUG | 5.347 | 1127A |
| flip_guide | | | | | | GGAGAUGGGGAAG (SEQ | | |
| | | | | | | ID NO: 1168) | | |
| NM_004572.3_C- | PKP2 | RESCUE | CCG | C/9 | R796C | GUGUGUAACCGGCAGAGG | 20.024 | 127A |
| flip_guide | | | | | | CUGUAGUUUCAAU (SEQ | | |
| | | | | | | ID NO: 1169) | | |
| NM_005609.3_C- | PYGM | RESCUE | GCG | C/9 | R798W | GCCGCGUCCCCUCUCUUG | 5.946 | 127A |
| flip_guide | | | | | | GGUUCUUGUACAA (SEQ | | |
| | | | | | | ID NO: 1170) | | |
| NM_005633.3_C- | SOS1 | RESCUE | ACG | C/9 | T269M | GCAUCUGUCCUUUCUACU | 39.582 | 127A |
| flip_guide | | | | | | GUAUCUUCUAUAU (SEQ | | |
| | | | | | | ID NO: 1171) | | |
| NM_014139.2_C- | SCN11A | RESCUE | CCG | C/9 | P396L | GCAACAGCCCGGGUUAAG | 32.565 | 127A |
| flip_guide | | | | | | UUAAUCAGGUAGA (SEQ | | |
| | | | | | | ID NO: 1172) | | |
| NM_014874.3_C- | MFN2 | RESCUE | CCG | C/9 | P76L | GCAACAGCCCGGGUUAAG | 20.769 | 127A |
| flip_guide | | | | | | UUAAUCAGGUAGA (SEQ | | |
| | | | | | | ID NO: 1173) | | |
| NM_015559.2_C- | SETBP1 | RESCUE | ACU | C/7 | T871I | GGUCCCACUGCCGCUGUC | 20.136 | 127A |
| flip_guide | | | | | | GCUGGGGAUCGUC (SEQ | | |
| | | | | | | ID NO: 1174) | | |
| NM_020630.4_C- | RET | RESCUE | CCG | C/5 | R620C | GUCGCCGAAGCACUUCUC | 15.762 | 127A |
| flip_guide | | | | | | CUCCUCAGGGAAG (SEQ | | |
| | | | | | | ID NO: 1175) | | |
| NM_000016.5_F_30bp_C- | ACADM | RESCUE | ACA | C/5 | H67Y | GUCAUCUUCUGCAGCCAC | 2.900 | 127B |
| flip_guide_30_5 | | | | | | UGGGAUGAUUUCC (SEQ | | |
| | | | | | | ID NO: 1176) | | |
| NM_000016.5_F_30bp_C- | ACADM | RESCUE | ACA | C/7 | H67Y | GUAUCAUCUUCUGCAGCC | 7.500 | 127B |
| flip_guide_30_7 | | | | | | ACUGGGAUGAUUU (SEQ | | |
| | | | | | | ID NO: 1177) | | |
| NM_000016.5_F_30bp_C- | ACADM | RESCUE | ACA | C/9 | H67Y | GUUUAUCAUCUUCUGCAG | 6.477 | 127B |
| flip_guide_30_9 | | | | | | CCACUGGGAUGAU (SEQ | | |
| | | | | | | ID NO: 1178) | | |
| NM_000018.3_F_30bp_C- | ACADVL | RESCUE | GCG | C/5 | A283V | GCACCCCAAAAGCUGUGA | 4.474 | 127B |
| flip_guide_30_5 | | | | | | UCUUCUCCUUCAC (SEQ | | |
| | | | | | | ID NO: 1178) | | |
| NM_000018.3_F_30bp_C- | ACADVL | RESCUE | GCG | C/7 | A283V | GUCCACCCCAAAAGCUGU | 5.357 | 127B |
| flip_guide_30_7 | | | | | | GAUCUUCUCCUUC (SEQ | | |
| | | | | | | ID NO: 1179) | | |
| NM_000018.3_F_30bp_C- | ACADVL | RESCUE | GCG | C/9 | A283V | GUCUCCACCCCAAAAGCU | 6.274 | 127B |
| flip_guide_30_9 | | | | | | GUGAUCUUCUCCU (SEQ | | |
| | | | | | | ID NO: 1180) | | |
| NM_000071.2_F_30bp_C- | CBS | RESCUE | GCG | C/5 | R109C | GUCACCCUUGGCCAAGAG | 1.269 | 127B |
| flip_guide_30_5 | | | | | | CUCACACUUCAGG (SEQ | | |
| | | | | | | ID NO: 1181) | | |
| NM_000071.2_F_30bp_C- | CBS | RESCUE | GCG | C/7 | R109C | GACUCACCCUUGGCCAAG | 2.346 | 127B |
| flip_guide_30_7 | | | | | | AGCUCACACUUCA (SEQ | | |
| | | | | | | ID NO: 1182) | | |
| NM_000071.2_F_30bp_C- | CBS | RESCUE | GCG | C/9 | R109C | GGAACUCACCCUUGGCCA | 6.140 | 127B |
| flip_guide_30_9 | | | | | | AGAGCUCACACUU (SEQ | | |
| | | | | | | ID NO: 1183) | | |
| NM_000138.4_F_30bp_C- | FBN1 | RESCUE | GCG | C/5 | R1408C | GGAGCCCUCAUCAAGGUC | 13.751 | 127B |
| flip_guide_30_5 | | | | | | UGUACAAGUGAAG (SEQ | | |
| | | | | | | ID NO: 1184) | | |
| NM_000138.4_F_30bp_C- | FBN1 | RESCUE | GCG | C/7 | R1408C | GCAGAGCCCUCAUCAAGG | 12.998 | 127B |
| flip_guide_30_7 | | | | | | UCUGUACAAGUGA (SEQ | | |
| | | | | | | ID NO: 1185) | | |
| NM_000138.4_F_30bp_C- | FBN1 | RESCUE | GCG | C/9 | R1408C | GCUCAGAGCCCUCAUCAA | 10.845 | 127B |
| flip_guide_30_9 | | | | | | GGUCUGUACAAGU (SEQ | | |
| | | | | | | ID NO: 1186) | | |
| NM_000141.4_F_30bp_C- | FGFR2 | RESCUE | CCC | C/5 | P267S | GGUGGCGGCAUUUGCCGG | 5.882 | 127B |
| flip_guide_30_5 | | | | | | CAGUCCGGCUUGG (SEQ | | |
| | | | | | | ID NO: 1187) | | |
| NM_000141.4_F_30bp_C- | FGFR2 | RESCUE | CCC | C/7 | P267S | GCUGUGGCGGCAUUUGCC | 16.131 | 127B |
| flip_guide_30_7 | | | | | | GGCAGUCCGGCUU (SEQ | | |
| | | | | | | ID NO: 1188) | | |
| NM_000141.4_F_30bp_C- | FGFR2 | RESCUE | CCC | C/9 | P267S | GCACUGUGGCGGCAUUUG | 13.994 | 127B |
| flip_guide_30_9 | | | | | | CCGGCAGUCCGGC (SEQ | | |
| | | | | | | ID NO: 1189) | | |
| NM_000152.4_F_30bp_C- | GAA | RESCUE | CCC | C/5 | P552L | GCUGGCGGGUCCCCCCAA | 2.316 | 127B |
| flip_guide_30_5 | | | | | | CCACCCCAGGCAC (SEQ | | |
| | | | | | | ID NO: 1190) | | |
| NM_000152.4_F_30bp_C- | GAA | RESCUE | CCC | C/7 | P552L | GGCCUGGCGGGUCCCCCC | 2.644 | 127B |
| flip_guide_30_7 | | | | | | AACCACCCCAGGC (SEQ | | |
| | | | | | | ID NO: 1191) | | |
| NM_000152.4_F_30bp_C- | GAA | RESCUE | CCC | C/9 | P552L | GCCGCCUGGCGGGUCCCC | 0.168 | 127B |
| flip_guide_30_9 | | | | | | CCAACCACCCCAG (SEQ | | |
| | | | | | | ID NO: 1192) | | |
| NM_000341.3 F_30bp_C- | SLC3A1 | RESCUE | ACG | C/5 | T467M | GAAGCCUGUUCAUCACGU | 26.164 | 127B |
| flip_guide_30_5 | | | | | | UGACAUACUGAUU (SEQ | | |
| | | | | | | ID NO: 1193) | | |
| NM_000341.3 F_30bp_C- | SLC3A1 | RESCUE | ACG | C/7 | T467M | GAGAAGCCUGUUCAUCAC | 28.198 | 127B |
| flip_guide_30_7 | | | | | | GUUGACAUACUGA (SEQ | | |
| | | | | | | ID NO: 1194) | | |
| NM_000341.3_F_30bp_C- | SLC3A1 | RESCUE | ACG | C/9 | T467M | GAAAGAAGCCUGUUCAUC | 24.276 | 127B |
| flip_guide_30_9 | | | | | | ACGUUGACAUACU (SEQ | | |
| | | | | | | ID NO: 1195) | | |
| NM_000375.2_F_30bp_C- | UROS | RESCUE | ACG | C/5 | R73C | GAAACCUAACUCUGCUGC | 8.539 | 127B |
| flip_guide_30_5 | | | | | | UUCCACUGCUCUG (SEQ | | |
| | | | | | | ID NO: 1196) | | |
| NM_000375.2_F_30bp_C- | UROS | RESCUE | ACG | C/7 | R73C | GCCAAACCUAACUCUGCU | 7.367 | 127B |
| flip_guide_30_7 | | | | | | GCUUCCACUGCUC (SEQ | | |
| | | | | | | ID NO: 1197) | | |
| NM_000375.2_F_30bp_C- | UROS | RESCUE | ACG | C/9 | R73C | GCUCCAAACCUAACUCUG | 13.632 | 127B |
| flip_guide_30_9 | | | | | | CUGCUUCCACUGC (SEQ | | |
| | | | | | | ID NO: 1198) | | |
| NM_000431.3 F_30bp_C- | MVK | RESCUE | ACA | C/5 | T268I | GAUCUCUUGAGGUCAGGA | 2.858 | 127B |
| flip_guide_30_5 | | | | | | GGGGGGCCACGAU (SEQ | | |
| | | | | | | ID NO: 1199) | | |
| NM_000431.3_F_30bp_C- | MVK | RESCUE | ACA | C/7 | T268I | GGCAUCUCUUGAGGUCAG | 13.008 | 127B |
| flip_guide_30_7 | | | | | | GAGGGGGGCCACG (SEQ | | |
| | | | | | | ID NO: 1200) | | |
| NM_000431.3_F_30bp_C- | MVK | RESCUE | ACA | C/9 | T268I | GUGGCAUCUCUUGAGGUC | 13.775 | 127B |
| flip_guide_30_9 | | | | | | AGGAGGGGGGCCA (SEQ | | |
| | | | | | | ID NO: 1201) | | |
| NM_000551.3_F_30bp_C- | VHL | RESCUE | CCG | C/5 | P158L | GUUUCCGAGUAUACACUG | 21.328 | 127B |
| flip_guide_30_5 | | | | | | GCAGUGUGAUAUU (SEQ | | |
| | | | | | | ID NO: 1202) | | |
| NM_000551.3_F_30bp_C- | VHL | RESCUE | CCG | C/7 | P158L | GUCUUUCCGAGUAUACAC | 22.466 | 127B |
| flip_guide_30_7 | | | | | | UGGCAGUGUGAUA (SEQ | | |
| | | | | | | ID NO: 1203) | | |
| NM_000551.3_F_30bp_C- | VHL | RESCUE | CCG | C/9 | P158L | GGCUCUUUCCGAGUAUAC | 20.534 | 127B |
| flip_guide_30_9 | | | | | | ACUGGCAGUGUGA (SEQ | | |
| | | | | | | ID NO: 1204) | | |
| NM_001256850.1_F_30bp_C- | TTN | RESCUE | ACG | C/5 | R30071C | GCCACCUGGGCCAGGGGA | 6.388 | 127B |
| flip_guide_30_5 | | | | | | AUCAAGCACUUUG (SEQ | | |
| | | | | | | ID NO: 1205) | | |
| NM_001256850.1_F_30bp_C- | TTN | RESCUE | ACG | C/7 | R30071C | GUUCCACCUGGGCCAGGG | 13.115 | 127B |
| flip_guide_30_7 | | | | | | GAAUCAAGCACUU (SEQ | | |
| | | | | | | ID NO: 1206) | | |
| NM_001256850.1_F_30bp_C- | TTN | RESCUE | ACG | C/9 | R30071C | GCUUUCCACCUGGGCCAG | 23.207 | 127B |
| flip_guide_30_9 | | | | | | GGGAAUCAAGCAC (SEQ | | |
| | | | | | | ID NO: 1207) | | |
| NM_002397.4_F_30bp_C- | MEF2C | RESCUE | ACG | C/5 | T1M | GCCCCCUAGUCCCCGUUU | 0.769 | 127B |
| flip_guide_30_5 | | | | | | UUCUUCUCUCUCU (SEQ | | |
| | | | | | | ID NO: 1208) | | |
| NM_002397.4_F_30bp_C- | MEF2C | RESCUE | ACG | C/7 | T1M | GCUCCCCCUAGUCCCCGU | 1.270 | 127B |
| flip_guide_30_7 | | | | | | UUUUCUUCUCUCU (SEQ | | |
| | | | | | | ID NO: 1209) | | |
| NM_002397.4_F_30bp_C- | MEF2C | RESCUE | ACG | C/9 | T1M | GUUCUCCCCCUAGUCCCC | 2.313 | 127B |
| flip_guide_30_9 | | | | | | GUUUUUCUUCUCU (SEQ | | |
| | | | | | | ID NO: 1210) | | |
| NM_002474.2_F_30bp_C- | MYH11 | RESCUE | CCG | C/5 | P1264L | GCUGCCGCUCCUGCACCU | 18.278 | 127B |
| flip_guide_30_5 | | | | | | GCGCCUCCAGCUU (SEQ | | |
| | | | | | | ID NO: 1211) | | |
| NM_002474.2_F_30bp_C- | MYH11 | RESCUE | CCG | C/7 | P1264L | GGACUGCCGCUCCUGCAC | 25.663 | 127B |
| flip_guide_30_7 | | | | | | CUGCGCCUCCAGC (SEQ | | |
| | | | | | | ID NO: 1212) | | |
| NM_002474.2_F_30bp_C- | MYH11 | RESCUE | CCG | C/9 | P1264L | GUGGACUGCCGCUCCUGC | 34.770 | 127B |
| flip_guide_30_9 | | | | | | ACCUGCGCCUCCA (SEQ | | |
| | | | | | | ID NO: 1213) | | |
| NM_002834.4_F_30bp_C- | PTPN11 | RESCUE | CCU | C/5 | L285F | GUCAACGGGCAGGAUGUU | 0.520 | 127B |
| flip_guide_30_5 | | | | | | UUUAUAUCUAUUU (SEQ | | |
| | | | | | | ID NO: 1214) | | |
| NM_002834.4_F_30bp_C- | PTPN11 | RESCUE | CCU | C/7 | L285F | GGAUCAACGGGCAGGAUG | 0.562 | 127B |
| flip_guide_30_7 | | | | | | UUUUUAUAUCUAU (SEQ | | |
| | | | | | | ID NO: 1215) | | |
| NM_002834.4_F_30bp_C- | PTPN11 | RESCUE | CCU | C/9 | L285F | GAUGAUCAACGGGCAGGA | 0.711 | 127B |
| flip_guide_30_9 | | | | | | UGUUUUUAUAUCU (SEQ | | |
| | | | | | | ID NO: 1216) | | |
| NM_004004.5_F_30bp_C- | GJB2 | RESCUE | ACG | C/5 | R77W | GGCCCCUAGCCGGAUGUG | 5.347 | 127B |
| flip_guide_30_5 | | | | | | GGAGAUGGGGAAG (SEQ | | |
| | | | | | | ID NO: 1217) | | |
| NM_004004.5_F_30bp_C- | GJB2 | RESCUE | ACG | C/7 | R77W | GGGGCCCCUAGCCGGAUG | 4.763 | 127B |
| flip_guide_30_7 | | | | | | UGGGAGAUGGGGA (SEQ | | |
| | | | | | | ID NO: 1218) | | |
| NM_004004.5_F_30bp_C- | GJB2 | RESCUE | ACG | C/9 | R77W | GCAGGGCCCCUAGCCGGA | 5.188 | 127B |
| flip_guide_30_9 | | | | | | UGUGGGAGAUGGG (SEQ | | |
| | | | | | | ID NO: 1219) | | |
| NM_004572.3_F_30bp_C- | PKP2 | RESCUE | CCG | C/5 | R796C | GUAACCGGCAGAGGCUGU | 12.583 | 127B |
| flip_guide_30_5 | | | | | | AGUUUCAAUGAGA (SEQ | | |
| | | | | | | ID NO: 1220) | | |
| NM_004572.3_F_30bp_C- | PKP2 | RESCUE | CCG | C/7 | R796C | GUGUAACCGGCAGAGGCU | 13.950 | 127B |
| flip_guide_30_7 | | | | | | GUAGUUUCAAUGA (SEQ | | |
| | | | | | | ID NO: 1221) | | |
| NM_004572.3_F_30bp_C- | PKP2 | RESCUE | CCG | C/9 | R796C | GUGUGUAACCGGCAGAGG | 20.024 | 127B |
| flip_guide_30_9 | | | | | | CUGUAGUUUCAAU (SEQ | | |
| | | | | | | ID NO: 1222) | | |
| NM_005609.3_F_30bp_C- | PYGM | RESCUE | GCG | C/5 | R798W | GGUCCCCUCUCUUGGGUU | 4.495 | 127B |
| flip_guide_30_5 | | | | | | CUUGUACAAGGCG (SEQ | | |
| | | | | | | ID NO: 1223) | | |
| NM_005609.3_F_30bp_C- | PYGM | RESCUE | GCG | C/7 | R798W | GGCGUCCCCUCUCUUGGG | 2.128 | 127B |
| flip_guide_30_7 | | | | | | UUCUUGUACAAGG (SEQ | | |
| | | | | | | ID NO: 1224) | | |
| NM_005609.3_F_30bp_C- | PYGM | RESCUE | GCG | C/9 | R798W | GCCGCGUCCCCUCUCUUG | 5.946 | 127B |
| flip_guide_30_9 | | | | | | GGUUCUUGUACAA (SEQ | | |
| | | | | | | ID NO: 1225) | | |
| NM_005633.3_F_30bp_C- | SOS1 | RESCUE | ACG | C/5 | T269M | GUGUCCUUUCUACUGUAU | 12.149 | 127B |
| flip_guide_30_5 | | | | | | CUUCUAUAUGGCC (SEQ | | |
| | | | | | | ID NO: 1226) | | |
| NM_005633.3_F_30bp_C- | SOS1 | RESCUE | ACG | C/7 | T269M | GUCUGUCCUUUCUACUGU | 36.068 | 127B |
| flip_guide_30_7 | | | | | | AUCUUCUAUAUGG (SEQ | | |
| | | | | | | ID NO: 1227) | | |
| NM_005633.3_F_30bp_C- | SOS1 | RESCUE | ACG | C/9 | T269M | GCAUCUGUCCUUUCUACU | 39.582 | 127B |
| flip_guide_30_9 | | | | | | GUAUCUUCUAUAU (SEQ | | |
| | | | | | | ID NO: 1228) | | |
| NM_014139.2_F_30bp_C- | SCN11A | RESCUE | CCG | C/5 | P396L | GAGCCCGGGUUAAGUUAA | 22.989 | 127B |
| flip_guide_30_5 | | | | | | UCAGGUAGAAGGA (SEQ | | |
| | | | | | | ID NO: 1229) | | |
| NM_014139.2_F_30bp_C- | SCN11A | RESCUE | CCG | C/7 | P396L | GACAGCCCGGGUUAAGUU | 16.783 | 127B |
| flip_guide_30_7 | | | | | | AAUCAGGUAGAAG (SEQ | | |
| | | | | | | ID NO: 1230) | | |
| NM_014139.2_F_30bp_C- | SCN11A | RESCUE | CCG | C/9 | P396L | GCAACAGCCCGGGUUAAG | 32.565 | 127B |
| flip_guide_30_9 | | | | | | UUAAUCAGGUAGA (SEQ | | |
| | | | | | | ID NO: 1231) | | |
| NM_014874.3_F_30bp_C- | MFN2 | RESCUE | CCG | C/5 | P76L | GGUCCCGAACCUGUUCUU | 7.822 | 127B |
| flip_guide_30_5 | | | | | | CUGUGGUAACGGG (SEQ | | |
| | | | | | | ID NO: 1232) | | |
| NM_014874.3_F_30bp_C- | MFN2 | RESCUE | CCG | C/7 | P76L | GACGUCCCGAACCUGUUC | 9.585 | 127B |
| flip_guide_30_7 | | | | | | UUCUGUGGUAACG (SEQ | | |
| | | | | | | ID NO: 1233) | | |
| NM_014874.3_F_30bp_C- | MFN2 | RESCUE | CCG | C/9 | P76L | GUGACGUCCCGAACCUGU | 20.769 | 127B |
| flip_guide_30_9 | | | | | | UCUUCUGUGGUAA (SEQ | | |
| | | | | | | ID NO: 1234) | | |
| NM_015559.2_F_30bp_C- | SETBP1 | RESCUE | ACU | C/5 | T871I | GCCCACUGCCGCUGUCGC | 4.665 | 127B |
| flip_guide_30_5 | | | | | | UGGGGAUCGUCUC (SEQ | | |
| | | | | | | ID NO: 1235) | | |
| NM_015559.2_F_30bp_C- | SETBP1 | RESCUE | ACU | C/7 | T871I | GGUCCCACUGCCGCUGUC | 20.136 | 127B |
| flip_guide_30_7 | | | | | | GCUGGGGAUCGUC (SEQ | | |
| | | | | | | ID NO: 1236) | | |
| NM_015559.2_F_30bp_C- | SETBP1 | RESCUE | ACU | C/9 | T871I | GCUGUCCCACUGCCGCUG | 9.130 | 127B |
| flip_guide_30_9 | | | | | | UCGCUGGGGAUCG (SEQ | | |
| | | | | | | ID NO: 1237) | | |
| NM_020630.4_F_30bp_C- | RET | RESCUE | CCG | C/5 | R620C | GUCGCCGAAGCACUUCUC | 15.762 | 127B |
| flip_guide_30_5 | | | | | | CUCCUCAGGGAAG (SEQ | | |
| | | | | | | ID NO: 1238) | | |
| NM_020630.4_F_30bp_C- | RET | RESCUE | CCG | C/7 | R620C | GGCUCGCCGAAGCACUUC | 12.758 | 127B |
| flip_guide_30_7 | | | | | | UCCUCCUCAGGGA (SEQ | | |
| | | | | | | ID NO: 1239) | | |
| NM_020630.4_F_30bp_C- | RET | RESCUE | CCG | C/9 | R620C | GGGGCUCGCCGAAGCACU | 15.652 | 127B |
| flip_guide_30_9 | | | | | | UCUCCUCCUCAGG (SEQ | | |
| | | | | | | ID NO: 1240) | | |
| ApoE4 rs429358 C flip 30 | APOE | RESCUE | GCG | C/30 | C130R | gccacguccuccaugucc | 0.040 | 128 |
| | | | | | | gcgcccagccggg (SEQ | | |
| | | | | | | ID NO: 1241) | | |
| ApoE4 rs429358 C flip 28 | APOE | RESCUE | GCG | C/28 | C130R | ggcccacguccuccaugu | 0.199 | 128 |
| | | | | | | ccgcgcccagccg (SEQ | | |
| | | | | | | ID NO: 1242) | | |
| ApoE4 rs429358 C flip 26 | APOE | RESCUE | GCG | C/26 | C130R | gccgcccacguccuccau | 0.534 | 128 |
| | | | | | | guccgcgcccagc (SEQ | | |
| | | | | | | ID NO: 1243) | | |
| ApoE4 rs429358 C flip 24 | APOE | RESCUE | GCG | C/24 | C130R | gggccgcccacguccucc | 0.601 | 128 |
| | | | | | | auguccgcgccca (SEQ | | |
| | | | | | | ID NO: 1244) | | |
| ApoE4 rs429358 C flip 22 | APOE | RESCUE | GCG | C/22 | C130R | ggcggccgcccacguccu | 0.305 | 128 |
| | | | | | | ccauguccgcgcc (SEQ | | |
| | | | | | | ID NO: 1245) | | |
| ApoE4 rs429358 C flip 20 | APOE | RESCUE | GCG | C/20 | C130R | gaggcggccgcccacguc | 0.251 | 128 |
| | | | | | | cuccauguccgcg (SEQ | | |
| | | | | | | ID NO: 1246) | | |
| ApoE4 rs429358 C flip 18 | APOE | RESCUE | GCG | C/18 | C130R | gccaggcggccgcccacg | 0.098 | 128 |
| | | | | | | uccuccauguccg (SEQ | | |
| | | | | | | ID NO: 1247) | | |
| ApoE4 rs429358 C flip 16 | APOE | RESCUE | GCG | C/16 | C130R | gcaccaggcggccgccca | 0.066 | 128 |
| | | | | | | cguccuccauguc (SEQ | | |
| | | | | | | ID NO: 1248) | | |
| ApoE4 rs429358 U flip 30 | APOE | RESCUE | GCG | U/30 | C130R | gucacguccuccaugucc | 0.037 | 128 |
| | | | | | | gcgcccagccggg (SEQ | | |
| | | | | | | ID NO: 1249) | | |
| ApoE4 rs429358 U flip 28 | APOE | RESCUE | GCG | U/28 | C130R | ggcucacguccuccaugu | 0.831 | 128 |
| | | | | | | ccgcgcccagccg (SEQ | | |
| | | | | | | ID NO: 1250) | | |
| ApoE4 rs429358 U flip 26 | APOE | RESCUE | GCG | U/26 | C130R | gccgcucacguccuccau | 0.787 | 128 |
| | | | | | | guccgcgcccagc (SEQ | | |
| | | | | | | ID NO: 1251) | | |
| ApoE4 rs429358 U flip 24 | APOE | RESCUE | GCG | U/24 | C130R | gggccgcucacguccucc | 5.382 | 128 |
| | | | | | | auguccgcgccca (SEQ | | |
| | | | | | | ID NO: 1252) | | |
| ApoE4 rs429358 U flip 22 | APOE | RESCUE | GCG | U/22 | C130R | ggcggccgcucacguccu | 0.913 | 128 |
| | | | | | | ccauguccgcgcc (SEQ | | |
| | | | | | | ID NO: 1253) | | |
| ApoE4 rs429358 U flip 20 | APOE | RESCUE | GCG | U/20 | C130R | gaggcggccgcucacguc | 0.654 | 128 |
| | | | | | | cuccauguccgcg (SEQ | | |
| | | | | | | ID NO: 1254) | | |
| ApoE4 rs429358 U flip 18 | APOE | RESCUE | GCG | U/18 | C130R | gccaggcggccgcucacg | 0.281 | 128 |
| | | | | | | uccuccauguccg (SEQ | | |
| | | | | | | ID NO: 1255) | | |
| ApoE4 rs429358 U flip 16 | APOE | RESCUE | GCG | U/16 | C130R | gcaccaggcggccgcuca | 0.236 | 128 |
| | | | | | | cguccuccauguc (SEQ | | |
| | | | | | | ID NO: 1256) | | |
| ApoE4 rs7412 C flip 30 | APOE | RESCUE | GCG | C/30 | C176R | gccuucugcaggucaucg | 0.079 | 128 |
| | | | | | | gcaucgcggagga (SEQ | | |
| | | | | | | ID NO: 1257) | | |
| ApoE4 rs7412 C flip 28 | APOE | RESCUE | GCG | C/28 | C176R | ggcccuucugcaggucau | 2.900 | 128 |
| | | | | | | cggcaucgcggag (SEQ | | |
| | | | | | | ID NO: 1258) | | |
| ApoE4 rs7412 C flip 26 | APOE | RESCUE | GCG | C/26 | C176R | gaggcccuucugcagguc | 0.908 | 128 |
| | | | | | | aucggcaucgcgg (SEQ | | |
| | | | | | | ID NO: 1259) | | |
| ApoE4 rs7412 C flip 24 | APOE | RESCUE | GCG | C/24 | C176R | gccaggcccuucugcagg | 2.397 | 128 |
| | | | | | | ucaucggcaucgc (SEQ | | |
| | | | | | | ID NO: 1260) | | |
| ApoE4 rs7412 C flip 22 | APOE | RESCUE | GCG | C/22 | C176R | gugccaggcccuucugca | 3.436 | 128 |
| | | | | | | ggucaucggcauc (SEQ | | |
| | | | | | | ID NO: 1261) | | |
| ApoE4 rs7412 C flip 20 | APOE | RESCUE | GCG | C/20 | C176R | gacugccaggcccuucug | 5.725 | 128 |
| | | | | | | caggucaucggca (SEQ | | |
| | | | | | | ID NO: 1262) | | |
| ApoE4 rs7412 C flip 18 | APOE | RESCUE | GCG | C/18 | C176R | gacacugccaggcccuuc | 2.987 | 128 |
| | | | | | | ugcaggucaucgg (SEQ | | |
| | | | | | | ID NO: 1263) | | |
| ApoE4 rs7412 C flip 16 | APOE | RESCUE | GCG | C/16 | C176R | gguacacugccaggcccu | 0.407 | 128 |
| | | | | | | ucugcaggucauc (SEQ | | |
| | | | | | | ID NO: 1264) | | |
| ApoE4 rs7412 U flip 30 | APOE | RESCUE | GCG | U/30 | C176R | gucuucugcaggucaucg | 0.125 | 128 |
| | | | | | | gcaucgcggagga (SEQ | | |
| | | | | | | ID NO: 1265) | | |
| ApoE4 rs7412 U flip 28 | APOE | RESCUE | GCG | U/28 | C176R | ggcucuucugcaggucau | 3.633 | 128 |
| | | | | | | cggcaucgcggag (SEQ | | |
| | | | | | | ID NO: 1266) | | |
| ApoE4 rs7412 U flip 26 | APOE | RESCUE | GCG | U/26 | C176R | gaggcucuucugcagguc | 1.087 | 128 |
| | | | | | | aucggcaucgcgg (SEQ | | |
| | | | | | | ID NO: 1267) | | |
| ApoE4 rs7412 U flip 24 | APOE | RESCUE | GCG | U/24 | C176R | gccaggcucuucugcagg | 3.305 | 128 |
| | | | | | | ucaucggcaucgc (SEQ | | |
| | | | | | | ID NO: 1268) | | |
| ApoE4 rs7412 U flip 22 | APOE | RESCUE | GCG | U/22 | C176R | gugccaggcucuucugca | 6.810 | 128 |
| | | | | | | ggucaucggcauc (SEQ | | |
| | | | | | | ID NO: 1269) | | |
| ApoE4 rs7412 U flip 20 | APOE | RESCUE | GCG | U/20 | C176R | gacugccaggcucuucug | 10.902 | 128 |
| | | | | | | caggucaucggca (SEQ | | |
| | | | | | | ID NO: 1270) | | |
| ApoE4 rs7412 U flip 18 | APOE | RESCUE | GCG | U/18 | C176R | gacacugccaggcucuuc | 9.357 | 128 |
| | | | | | | ugcaggucaucgg (SEQ | | |
| | | | | | | ID NO: 1271) | | |
| ApoE4 rs7412 U flip 16 | APOE | RESCUE | GCG | U/16 | C176R | gguacacugccaggcucu | 0.643 | 128 |
| | | | | | | ucugcaggucauc (SEQ | | |
| | | | | | | ID NO: 1272) | | |

TABLE 32
Mammalian plasmids and maps

| Plasmid | Description | Benchling link |
|---|---|---|
| pC0043 | PspCas13b crRNA | benchling.com/s/s eq- |
| | backbone | OH6nMnZCZn930BWqcFNa |
| pC0076 | CMV-dRanCas13b-mapkNES- | benchling.com/s/s eq- |
| | GS-dADAR2 E488Q | BulRvsrtwP4aEJtTqYM2 |
| pC0077 | pCMV-dRanCas13b-mapkNES- | benchling.com/s/s eq- |
| | GS-dADAR2(E488Q/V351G/ | gQ13PMPLkcO6OceAfmpC |
| | S486A/T375S/S370C/P462A/ | |
| | N597I/L332I/I398V) r8 | |
| pC0078 | pCMV-dRanCas13b-mapkNES- | benchling.com/s/s eq- |
| | GS-dADAR2(E488Q/V351G/ | 19Ytwwh0o0vSlbyXYZ95 |
| | S486A/T375S/S370C/P462A/ | |
| | N597I/L332I/I398V/K350I/ | |
| | M383L/D619G/S582T/V440I/ | |
| | S495N/K418E/S661T) r16 | |
| pC0079 | pCMV-dRanCas13b-mapkNES- | benchling.com/s/s eq- |
| | GS-dADAR2(E488Q/V351G/ | WX6VnavLS6JaaZ54XAOx |
| | S486A/T375A/S370C/P462A/ | |
| | N597I/L332I/I398V/K350I/ | |
| | M383L/D619G/S582T/V440I/ | |
| | S495N/K418E/S661T) | |
| | RESCUE-S | |
| pC0080 | pCMV-dCas13b12-HIVNES- | benchling.com/s/s eq- |
| | GS-dADAR2(E488Q/V351G/ | GQqPCRE9I6KnEfHksQem |
| | S486A/T375S/S370C/P462A/ | |
| | N597I/L332I/I398V/K350I/ | |
| | M383L/D619G/S582T/V440I/ | |
| | S495N/K418E/S661T) RESCUE | |
| pC0081 | pCMV-dCas13b12-HIVNES- | benchling.com/s/s eq- |
| | GS-dADAR2(E488Q/V351G/ | qjbEAXZgupeRXBa8abls |
| | S486A/T375S/S370C/P462A/ | |
| | N597I/L332I/I398V/K350I/ | |
| | M383L/D619G/S582T/V440I/ | |
| | S495N/K418E/S661T/S375A) | |
| | RESCUE-S | |
| pC0082 | CMV-Cluciferase-polyA EF1a- | benchling.com/s/s eq- |
| | G-luciferase(C82R)-polyA C | Qjsg3Yx0r1Hs77GT58BI |
| | to U reporter TCG motif | |
| pC0083 | CMV-Cluciferase-polyA EF1a- | benchling.com/s/s eq- |
| | G-luciferase(C82R)-polyA C | Z8zwu3LdetcuYHAFGnpe |
| | to U reporter GCG motif | |
| pC0084 | CMV-Cluciferase-polyA EF1a- | benchling.com/s/s eq- |
| | G-luciferase(C82R)-polyA C | G2Iag6I8NBQAXqbJnou5 |
| | to U reporter ACG motif | |
| pC0085 | CMV-Cluciferase-polyA EF1a- | benchling.com/s/s eq- |
| | G-luciferase(C82R)-polyA C | alkwhNUsFTg80TVmpquP |
| | to U reporter CCG motif | |
| pC0086 | CMV-Cluciferase-polyA EF1a- | benchling.com/s/s eq- |
| | G-luciferase(L77P)-polyA C | 1J8Fm6vtF7GZS676Q7p |
| | to U reporter CCA motif | |
| pC0087 | CMV-Cluciferase-polyA EF1a- | benchling.com/s/s eq- |
| | G-luciferase(L77P)-polyA C | 5MMokwvxoAjq6ML2sjjZ |
| | to U reporter CCT motif | |
| pC0088 | pCMV-ADAR2dd(E488Q/ | benchling.com/s/s eq- |
| | V351G/S486A/T375S/ | YISAybq2YnuclVwYDy95 |
| | S370C/P462A/N597I/ | |
| | L332I/I398V/K350I/ | |
| | M383L/D619G/S582T/ | |
| | V440I/S495N/K418E/ | |
| | S661T) r16 | |
| pC0089 | pCMV-ADAR2 full length | benchling.com/s/s eq- |
| | (E488Q/V351G/S486A/T375S/ | 95ZpoHj9GhQFzIu3m6cb |
| | S370C/P462A/N597I/L332I/ | |
| | I398V/K350I/M383L/D619G/ | |
| | S582T/V440I/S495N/K418E/ | |
| | S661T) r16 | |
| pC0090 | Beta catenin reporter M50 | benchling.com/s/s eq- |
| | Super 8x (TCF/LEF binding | jPxZnxs3wSeKZhgTTDBu |
| | sites) TOPFlash with | |
| | Gluc/Cluc | |
| pC0091 | Beta catenin reporter | benchling.com/s/s eq- |
| | control M51 Super 8x | 130b6c9baCfw8R3lTgs R |
| | (mutated TCF/LEF binding | |
| | sites) FOPFlash with | |
| | Gluc/Cluc | |

TABLE 33
Yeast plasmids and maps

| Description | Benchling link |
|---|---|
| pGAL-dRanCas13b-GS- | benchling.com/s/seq- |
| dADAR2 [RESCUEr0 Yeast] | w1l2aOHR2gSe4P2aQ7VY |
| pGAL-dRanCas13b-GS- | benchling.com/s/seq- |
| dADAR2(V351/S486A/T375S) | saQngvNf6i3GhSGF0H3I |
| [RESCUEr3 Yeast] | |
| pGAL-dRanCas13b-GS- | benchling.com/s/seq- |
| dADAR2(V351G/S486A/T375S/ | GIJ7BnpV3Vd3XtKiIxdm |
| S370C/P462A/L332I) | |
| [RESCUEr7 Yeast] | |
| pYES3/CT pADH1-HH-Targeting- | benchling.com/s/seq- |
| RanCas13b_DR-- HDV-space- | Xs2ffVMn4FwwQ79zDDEo |
| ADH1_terminator His (P196L) | |
| [Yeast target His P196L] | |
| pYES3/CT pADH1-HH- | benchling.com/s/seq- |
| Golden-gate-BsmBi- | UM9NjG7JKK0GFe9MowGo |
| BsmbI_RanCas13b_DR--HDV-space- | |
| ADH1_terminator His (P196L) | |
| [Yeast target His P196L NT] | |
| pYES3/CT pADH1-HH- | benchling.com/s/seq- |
| Guide-RanCas13b_DR--HDV-space- | EefJI5brqll3fm0B5Qc5 |
| ADH1_terminator His S129P | |
| [Yeast target His S129P] | |
| pYES3/CT pADH1-HH- | benchling.com/s/seq- |
| Golden-gate-BsmBi- | bt7gOlrp8OuOoV3YJWZG |
| BsmbI_RanCas13b_DR--HDV-space- | |
| ADH1_terminator His Motifs S129P | |
| [Yeast target His S129P NT] | |
| pYES3/CT pADH1-HH- | benchling.com/s/seq- |
| Y66H-targeting-RanCas13b-DR-HDV- | hiMELqTYPT9y0nOAKEq2 |
| ADH1-term ATG-yeGFP Y66H | |
| [Yeast target GFP Y66H] | |
| pYES3/CT pADH1-HH- | benchling.com/s/seq- |
| Golden-gate-BsmBi- | OCWlvnjeKYwSbG8GELTQ |
| BsmbI_-RanCas13b_DR-HDV- | |
| ADH1-term ATG-yeGFP Y66H | |
| Reporter | |
| [Yeast target GFP Y66H NT] | |
| pYES3/CT pADH1-HH-Targeting- | benchling.com/s/seq- |
| RanCas13b_DR-- HDV-space- | ziOgQXpXGZwot9NDkFJf |
| ADH1_terminator His (S22P) | |
| [Yeast target 30/26 His S22P] | |
| pYES3/CT pADH1-HH-Targeting- | benchling.com/s/seq- |
| RanCas13b_DR-- HDV-space- | Ni9S7NsmGwWEYQM7K1EF |
| ADH1_terminator His (S22P) | |
| [Yeast target 30/24 His S22P] | |
| pYES3/CT pADH1-HH-Targeting- | benchling.com/s/seq- |
| RanCas13b_DR-- HDV-space- | yW539UdpUtm9kZbLafaJ |
| ADH1_terminator His (S22P) | |
| [Yeast target 30/22 His S22P] | |
| pYES3/CT pADH1-HH-Targeting- | benchling.com/s/seq- |
| RanCas13b_DR-- HDV-space- | z37Sri5Pds8UofSHRtGe |
| ADH1_terminator His (S22P) | |
| [Yeast target 30/20 His S22P] | |
| pYES3/CT pADH1-HH- | benchling.com/s/seq- |
| Golden-gate-BsmBi- | 6HoWi69XrcLL4nW2ya0V |
| BsmbI_RanCas13b_DR--HDV-space- | |
| ADH1_terminator His (S22P) | |
| [Yeast target His S22P NT] | |

TABLE 34
Guide sequences used for yeast targeting

| | | | Base | | | |
|---|---|---|---|---|---|---|
| | | | flip/spacer | | | |
| | Targeted | | length/ | Codon | | First |
| Name | gene | Motif | position | change | Spacer sequence | figure |
| His Y66H | EGFP | UCA | U/50/34 | Y66H | aaacauugaacacc | 113A |
| targeting | | | | | auuaguuaaaguag | |
| | | | | | ugacuaagguuggc | |
| | | | | | cauggaac (SEQ | |
| | | | | | ID NO: 1273) | |
| His L196P | HIS | CCU | U/50/34 | L196P | ucuuauggcaaccg | 113C |
| targeting | | | | | caugagccuugaac | |
| | | | | | gcacucucacuacg | |
| | | | | | gugaugau (SEQ | |
| | | | | | ID NO: 1274) | |
| His S129P | HIS | UCC | C/30/26 | S129P | gcuugcaagugccu | 113D |
| targeting | | | | | cauccaaaggcgca | |
| | | | | | aau (SEQ ID | |
| | | | | | NO: 1275) | |
| His S22P | HIS | UCC | U/30/26 | S22P | aauguaaucgcaau | 113E |
| targeting 30/26 | | | | | cugaaucuugguuu | |
| | | | | | ca (SEQ ID | |
| | | | | | NO: 1276) | |
| His S22P | HIS | UCC | U/30/24 | S22P | uuaauguaaucgca | 113E |
| targeting 30/24 | | | | | aucugaaucuuggu | |
| | | | | | uu (SEQ ID | |
| | | | | | NO: 1277) | |
| His S22P | HIS | UCC | U/30/22 | S22P | cuuuaauguaaucg | 113E |
| targeting 30/22 | | | | | caaucugaaucuug | |
| | | | | | gu (SEQ ID | |
| | | | | | NO: 1278) | |
| His S22P | HIS | UCC | U/30/20 | S22P | cccuuuaauguaau | 113E |
| targeting 30/20 | | | | | cgcaaucugaaucu | |
| | | | | | ug (SEQ ID | |
| | | | | | NO: 1279) | |

### REFERENCES

[1488] 1. O. O. Abudayyeh et al., C2c2 is a single-component programmable RNA-guided RNA-targeting CRISPR effector. Science 353, aaf5573 (2016).
[1489] 2. C. Cassidy-Amstutz et al., Identification of a Minimal Peptide Tag for in Vivo and in Vitro Loading of Encapsulin. Biochemistry 55, 3461-3468 (2016).
[1490] 3. S. Shmakov et al., Discovery and Functional Characterization of Diverse Class 2 CRISPR-Cas Systems. Mol Cell 60, 385-397 (2015).
[1491] 4. A. A. Smargon et al., Cas13b Is a Type VI-B CRISPR-Associated RNA-Guided RNase Differentially Regulated by Accessory Proteins Csx27 and Csx28. Mol Cell 65, 618-630 e617 (2017).
[1492] 5. A. East-Seletsky et al., Two distinct RNase activities of CRISPR-C2c2 enable guide-RNA processing and RNA detection. Nature 538, 270-273 (2016).
[1493] 6. O. O. Abudayyeh et al., RNA targeting with CRISPR-Cas13. Nature 550, 280-284 (2017).
[1494] 7. D. B. T. Cox et al., RNA editing with CRISPR-Cas13. Science 358, 1019-1027 (2017).
[1495] 8. T. Merkle et al., Precise RNA editing by recruiting endogenous ADARs with anti sense oligonucleotides. Nat Biotechnol 37, 133-138 (2019).
[1496] 9. P. Vogel et al., Efficient and precise editing of endogenous transcripts with SNAP-tagged ADARs. Nat Methods 15, 535-538 (2018).
[1497] 10. M. Fukuda et al., Construction of a guide-RNA for site-directed RNA mutagenesis utilising intracellular A-to-I RNA editing. Sci Rep 7, 41478 (2017).
[1498] 11. J. Wettengel, P. Reautschnig, S. Geisler, P. J. Kahle, T. Stafforst, Harnessing human ADAR2 for RNA repair—Recoding a PINK1 mutation rescues mitophagy. Nucleic Acids Res 45, 2797-2808 (2017).
[1499] 12. M. F. Montiel-Gonzalez, I. C. Vallecillo-Viejo, J. J. Rosenthal, An efficient system for selectively altering genetic information within mRNAs. Nucleic Acids Res 44, e157 (2016).
[1500] 13. P. Vogel, M. F. Schneider, J. Wettengel, T. Stafforst, Improving site-directed RNA editing in vitro and in cell culture by chemical modification of the guideRNA. Angew Chem Int Ed Engl 53, 6267-6271 (2014).
[1501] 14. M. F. Montiel-Gonzalez, I. Vallecillo-Viejo, G. A. Yudowski, J. J. Rosenthal, Correction of mutations within the cystic fibrosis transmembrane conductance regulator by site-directed RNA editing. Proc Natl Acad Sci USA 110, 18285-18290 (2013).
[1502] 15. H. A. Rees, D. R. Liu, Base editing: precision chemistry on the genome and transcriptome of living cells. Nat Rev Genet 19, 770-788 (2018).
[1503] 16. A. C. Komor, Y. B. Kim, M. S. Packer, J. A. Zuris, D. R. Liu, Programmable editing of a target base in genomic DNA without double-stranded DNA cleavage. Nature 533, 420-424 (2016).
[1504] 17. K. Nishida et al., Targeted nucleotide editing using hybrid prokaryotic and vertebrate adaptive immune systems. Science 353, (2016).
[1505] 18. J. D. Salter, R. P. Bennett, H. C. Smith, The APOBEC Protein Family: United by Structure, Divergent in Function. Trends Biochem Sci 41, 578-594 (2016).
[1506] 19. S. Jin et al., Cytosine, but not adenine, base editors induce genome-wide off-target mutations in rice. Science, (2019).
[1507] 20. E. Zuo et al., Cytosine base editor generates substantial off-target single-nucleotide variants in mouse embryos. Science, (2019).
[1508] 21. J. Grunewald et al., Transcriptome-wide off-target RNA editing induced by CRISPR-guided DNA base editors. Nature, (2019).
[1509] 22. M. R. Macbeth et al., Inositol hexakisphosphate is bound in the ADAR2 core and required for RNA editing. Science 309, 1534-1539 (2005).
[1510] 23. M. M. Matthews et al., Structures of human ADAR2 bound to dsRNA reveal base-flipping mechanism and basis for site selectivity. Nature structural & molecular biology 23, 426-433 (2016).
[1511] 24. D. Katrekar et al., In vivo RNA editing of point mutations via RNA-guided adenosine deaminases. Nat Methods 16, 239-242 (2019).
[1512] 25. B. T. MacDonald, K. Tamai, X. He, Wnt/beta-catenin signaling: components, mechanisms, and diseases. Dev Cell 17, 9-26 (2009).
[1513] 26. M. K. Chee, S. B. Haase, New and Redesigned pRS Plasmid Shuttle Vectors for Genetic Manipulation of Saccharomyces cerevisiae. G3 (Bethesda) 2, 515-526 (2012).
[1514] 27. M. F. Laughery et al., New vectors for simple and streamlined CRISPR-Cas9 genome editing in Saccharomyces cerevisiae. Yeast 32, 711-720 (2015).
[1515] 28. M. R. Macbeth, B. L. Bass, Large-scale overexpression and purification of ADARs from Saccharomyces cerevisiae for biophysical and biochemical studies. Methods Enzymol 424, 319-331 (2007).
[1516] 29. H. Ng, N. Dean, Dramatic Improvement of CRISPR/Cas9 Editing in Candida albicans by Increased Single Guide RNA Expression. mSphere 2, (2017).
[1517] 30. R. Heim, D. C. Prasher, R. Y. Tsien, Wavelength mutations and posttranslational autoxidation of green fluorescent protein. Proc Natl Acad Sci USA 91, 12501-12504 (1994).
[1518] 31. Y. Wang, P. A. Beal, Probing RNA recognition by human ADAR2 using a high-throughput mutagenesis method. Nucleic Acids Res 44, 9872-9880 (2016).
[1519] 32. R. D. Gietz, R. H. Schiestl, Large-scale high-efficiency yeast transformation using the LiAc/SS carrier DNA/PEG method. Nat Protoc 2, 38-41 (2007).
[1520] 33. S. B. Kim, H. Suzuki, M. Sato, H. Tao, Superluminescent variants of marine luciferases for bioassays. Anal Chem 83, 8732-8740 (2011).
[1521] 34. M. T. Veeman, D. C. Slusarski, A. Kaykas, S. H. Louie, R. T. Moon, Zebrafish prickle, a modulator of noncanonical Wnt/Fz signaling, regulates gastrulation movements. Curr Biol 13, 680-685 (2003).

[1522] Various modifications and variations of the described methods, pharmaceutical compositions, and kits of the invention will be apparent to those skilled in the art without departing from the scope and spirit of the invention. Although the invention has been described in connection with specific embodiments, it will be understood that it is capable of further modifications and that the invention as claimed should not be unduly limited to such specific embodiments. Indeed, various modifications of the described modes for carrying out the invention that are obvious to those skilled in the art are intended to be within the scope of the invention. This application is intended to cover any variations, uses, or adaptations of the invention following, in general, the principles of the invention and including such departures from the present disclosure come within known customary practice within the art to which the invention pertains and may be applied to the essential features herein before set forth.

The application's sequence listing, which the Patent Office published only in electronic form, follows.

SEQUENCE LISTING (1280 sequences)

SEQ ID NO: 1 - RNA, 42 nt, Prevotella buccae
hgccuuguugcaucugccuucuuuuugaaagguaaaaacaac

SEQ ID NO: 2 - RNA, 36 nt, Prevotella buccae
guugcaucugccuucuuuuugaaagguaaaaacaac

SEQ ID NO: 3 - RNA, 37 nt, Prevotella buccae
uguugcaucugccuucuuuuugaaagguaaaaacaac

SEQ ID NO: 4 - RNA, 36 nt, Prevotella buccae; identical to SEQ ID NO: 2

SEQ ID NO: 5 - RNA, 36 nt, Prevotella buccae
guugcaucugccugcuguuugcaagguaaaaacaac

SEQ ID NO: 6 - RNA, 36 nt, Prevotella buccae
guugggacugcucucacuuugaaggguauucacaac

SEQ ID NO: 7 - RNA, 36 nt, Prevotella buccae
guuguaucugccuucuguuugaaagguaaaaacaac

SEQ ID NO: 8 - RNA, 36 nt, Prevotella buccae
guugugucuaccuccuuuuugagagguaaaaacagc

SEQ ID NO: 9 - RNA, 36 nt, Prevotella buccae
guuggaucuacccucuauuugaaggguacacacaac

SEQ ID NO: 10 - RNA, 36 nt, Prevotella buccae; identical to SEQ ID NO: 2

SEQ ID NO: 11 - RNA, 36 nt, Prevotella buccae
caacguagacggaagaaaaacuuuccauuuuuguug

SEQ ID NO: 12 - protein, 83 aa, Prevotella buccae
PFYDYPFNIGNRLKPKKRQFLDKKERVELWQKNKELFKNYPSEKKKTDLAYLDFLSWKKFERELRLIKNQDIVTWLMFKELFN

SEQ ID NO: 13 - protein, 64 aa, Lachnospiraceae bacterium
LNEIINNFNGIRIKTDYHSLLDKKEKERFEARQNWTSIENIKELKAGYISQVVHKICELVEKYD

SEQ ID NO: 14 - protein, 1128 aa, Prevotella buccae
MQKQDKLFVDRKKNAIFAFPKYITIMENKEKPEPIYYELTDKHFWAAFLNLARHNVYTTINHINRRLEIAELKDDGYMMGIKGSWNEQAKKLDKKVRLRDLIMKHFPFLEAAAYEMTNSKSPNNKEQREKEQSEALSLNNLKNVLFIFLEKLQVLRNYYSHYKYSEESPKPIFETSLLKNMYKVFDANVRLVKRDYMHHENIDMQRDFTHLNRKKQVGRTKNIIDSPNFHYHFADKEGNMTIAGLLFFVSLFLDKKDAIWMQKKLKGFKDGRNLREQMTNEVFCRSRISLPKLKLENVQTKDWMQLDMLNELVRCPLSLYERLREKDRESFKVPFDIFSDDYNAEEEPFKNTLVRHQDRFPYFVLRYFDLNEIFEQLRFQIDLGTYHFSIYNKRIGDEDEVRHLTHHLYGFARIQDFAPQNQPEEWRKLVKDLDHFETSQEPYISKTAPHYHLENEKIGIKFCSAHNNLFPSLQTDKTCNGRSKFNLGTQFTAEAFLSVHELLPMMFYYLLLTKDYSRKESADKVEGIIRKEISNIYAIYDAFANNEINSIADLTRRLQNTNILQGHLPKQMISILKGRQKDMGKEAERKIGEMIDDTQRRLDLLCKQTNQKIRIGKTNAGLLKSGKIADWLVNDMMRFQPVQKKDQNNIPINNSKANSTEYRMLQRALALFGSENFRLKAYFNQMNLVGNDNPHPFLAETQWEHQTNILSFYRNYLEARKKYLKGLKPQNWKQYQHFLILKVQKTNRNTLVTGWKNSFNLPRGIFTQPIREWFEKHNNSKRIYDQILSFDRVGFVAKAIPLYFAEEYKDNVQPFYDYPFNIGNRLKPKKRQFLDKKERVELWQKNKELFKNYPSEKKKTDLAYLDFLSWKKFERELRLIKNQDIVTWLMFKELFNMATVEGLKIGEIHLRDIDTNTANEESNNILNRIMPMKLPVKTYETDNKGNILKERPLATFYIEETETKVLKQGNFKALVKDRRLNGLFSFAETTDLNLEEHPISKLSVDLELIKYQTTRISIFEMTLGLEKKLIDKYSTLPTDSFRNMLERWLQCKANRPELKNYVNSLIAVRNAFSHNQYPMYDATLFAEVKKFTLFPSVDTKKIELNIAPQLLEIVGKAIKEIEKSENKN

SEQ ID NO: 15 - protein, 1126 aa, Prevotella intermedia
MEDDKKTTDSIRYELKDKHFWAAFLNLARHNVYITVNHINKILEEGEINRDGYETTLKNTWNEIKDINKKDRLSKLIIKHFPFLEAATYRLNPTDTTKQKEEKQAEAQSLESLRKSFFVFIYKLRDLRNHYSHYKHSKSLERPKFEEGLLEKMYNIFNASIRLVKEDYQYNKDINPDEDFKHLDRTEEEFNYYFTKDNEGNITESGLLFFVSLFLEKKDAIWMQQKLRGFKDNRENKKKMTNEVFCRSRMLLPKLRLQSTQTQDWILLDMLNELIRCPKSLYERLREEDREKFRVPIEIADEDYDAEQEPFKNTLVRHQDRFPYFALRYFDLNEIFTNLRFQIDLGTYHFSIYKKQIGDYKESHHLTHKLYGFERIQEFTKQNRPDEWRKFVKTFNSFETSKEPYIPETTPHYHLENQKIGIRFRNDNDKIWPSLKTNSEKNEKSKYKLDKSFQAEAFLSVHELLPMMFYYLLLKTENTDNDNEIETKKKENKNDKQEKHKIEEIIENKITEIYALYDTFANGEIKSIDELEEYCKGKDIEIGHLPKQMIAILKDEHKVMATEAERKQEEMLVDVQKSLESLDNQINEEIENVERKNSSLKSGKIASWLVNDMMRFQPVQKDNEGKPLNNSKANSTEYQLLQRTLAFFGSEHERLAPYFKQTKLIESSNPHPFLKDTEWEKCNNILSFYRSYLEAKKNFLESLKPEDWEKNQYFLKLKEPKTKPKTLVQGWKNGFNLPRGIFTEPIRKWFMKHRENITVAELKRVGLVAKVIPLFFSEEYKDSVQPFYNYHFNVGNINKPDEKNFLNCEERRELLRKKKDEFKKMTDKEKEENPSYLEFKSWNKFERELRLVRNQDICTWLLCMELFNKKKIKELNVEKIYLKNINTNTTKKEKNTEEKNGEEKNIKEKNNILNRIMPMRLPIKVYGRENFSKNKKKKIRRNTFFTVYIEEKGTKLLKQGNFKALERDRRLGGLFSFVKTPSKAESKSNTISKLRVEYELGEYQKARIEIIKDMLALEKTLIDKYNSLDTDNFNKMLTDWLELKGEPDKASFQNDVDLLIAVRNAFSHNQYPMRNRIAFANINPFSLSSANTSEEKGLGIANQLKDKTHKTIEKIIEIEKPIETKE

SEQ ID NO: 16 - protein, 1098 aa, Riemerella anatipestifer
MEKPLLPNVYTLKHKFFWGAFLNIARHNAFITICHINEQLGLKTPSNDDKIVDVVCETWNNILNNDHDLLKKSQLTELILKHFPFLTAMCYHPPKKEGKKKGHQKEQQKEKESEAQSQAEALNPSKLIEALEILVNQLHSLRNYYSHYKHKKPDAEKDIFKHLYKAFDASLRMVKEDYKAHFTVNLTRDFAHLNRKGKNKQDNPDFNRYRFEKDGFFTESGLLFFTNLFLDKRDAYWMLKKVSGFKASHKQREKMTTEVFCRSRILLPKLRLESRYDHNQMLLDMLSELSRCPKLLYEKLSEENKKHFQVEADGFLDEIEEEQNPFKDTLIRHQDRFPYFALRYLDLNESFKSIRFQVDLGTYHYCIYDKKIGDEQEKRHLTRTLLSFGRLQDFTEINRPQEWKALTKDLDYKETSNQPFISKTTPHYHITDNKIGFRLLGTSKELYPSLLEIKDGANRIAKYPYNSGFVAHAFISVHELLPLMFYQHLTGKSEDLLKETVRHIQRIYKDFEEERINTIEDLEKANQGRLPLGAFPKQMLGLLQNKQPDLSEKAKIKIEKLIAETKLLSHRLNTKLKSSPKLGKRREKLIKTGVLADWLVKDFMRFQPVAYDAQNQPIKSSKANSTEFWFIRRALALYGGEKNRLEGYFKQTNLIGNTNPHPFLNKFNWKACRNLVDFYQQYLEQREKFLEAIKNQPWEPYQYCLLLKIPKENRKNLVKGWEQGGISLPRGLFTEAIRETLSEDLMLSKPIRKEIKKHGRVGFISRAITLYFKEKYQDKHQSFYNLSYKLEAKAPLLKREEHYEYWQQNKPQSPTESQRLELHTSDRWKDYLLYKRWQHLEKKLRLYRNQDVMLWLMTLELTKNHFKELNLNYHQQLKLENLAVNVQESDAKLNPLNQTLPMVLPVKVYPATAFGEVQYHKTPIRTVYIREEHTKALKMGNFKALVKDRRLNGLFSFIKEENDTQKHPISQLRLRRELEIYQSLRVDAFKETLSLEEKLLNKHTSLSSLENEFRALLEEWKKEYAASSMVTDEHIAFIASVRNAFCHNQYPFYKEALHAPIPLFTVAQPTTEEKDGLGIAEALLKVLREYCEIVKSQI

SEQ ID NO: 17 - protein, 1124 aa, Prevotella aurantiaca
MEDDKKTTGSISYELKDKHFWAAFLNLARHNVYITINHINKLLEIREIDNDEKVLDIKTLWQKGNKDLNQKARLRELMTKHFPFLETAIYTKNKEDKKEVKQEKQAEAQSLESLKDCLFLFLDKLQEARNYYSHYKYSEFSKEPEFEEGLLEKMYNIFGNNIQLVINDYQHNKDINPDEDFKHLDRKGQFKYSFADNEGNITESGLLFFVSLFLEKKDAIWMQQKLNGFKDNLENKKKMTHEVFCRSRILMPKLRLESTQTQDWILLDMLNELIRCPKSLYERLQGDDREKFKVPFDPADEDYNAEQEPFNKTLIRHQDRFPYFVLRYFDYNEIFKNLRFQIDLGTYHFSIYKKLIGGQKEDRHLTHKLYGFERIQEFAKQNRPDEWKAIVKDLDTYETSNKRYISETTPHYHLENQKIGIRFRNGNKEIWPSLKTNDENNEKSKYKLDKQYQAEAFLSVHELLPMMFYYLLLKKEKPNNDEINASIVEGFIKREIRNIFKLYDAFANGEINNIDDLEKYCADKGIPKRHLPKQMVAILYDEHKDMVKEAKRKQKEMVKDTKKLLATLEKQTQKEKEDDGRNVKLLKSGEIARWLVNDMMRFQPVQKDNEGKPLNNSKANSTEYQMLQRSLALYNNEEKPTRYFRQVNLIESNNPHPFLKWTKWEECNNILTFYYSYLTKKIEFLNKLKPEDWKKNQYFLKLKEPKTNRETLVQGWKNGFNLPRGIFTEPIREWFKRHQNNSKEYEKVEALDRVGLVTKVIPLFFKEEYFKDKEENFKEDTQKEINDCVQPFYNFPYNVGNIHKPKEKDFLHREERIELWDKKKDKFKGYKEKIKSKKLTEKDKKFRSYLEFQSWNKFERELRLVRNQDIVTWLLCKELIDKLKIDELNIEELKKLRLNNIDTDTTAKKEKNNILNRVMPMELPVTVYEIDDSHKIVKDKPLHTIYIKEAETKLLKQGNFKALVKDRRLNGLFSFVKTNSEAESKRNPISKLRVEYELGEYQEARIEIIQDMLALEEKLINKYKDLPTNKFSEMLNSWLEGKDEADKARFQNDVDFLIAVRNAFSHNQYPMHNKIEFANIKPFSLYTANNSEEKGLGIANQLKDKTKETTDKIKKIEKPIETKE

SEQ ID NO: 18 - protein, 1151 aa, Prevotella saccharolytica
MEDKPFWAAFFNLARHNVYLTVNHINKLLDLEKLYDEGKHKEIFEREDIFNISDDVMNDANSNGKKRKLDIKKIWDDLDTDLTRKYQLRELILKHFPFIQPAIIGAQTKERTTIDKDKRSTSTSNDSLKQTGEGDINDLLSLSNVKSMFFRLLQILEQLRNYYSHVKHSKSATMPNFDEDLLNWMRYIFIDSVNKVKEDYSSNSVIDPNTSFSHLIYKDEQGKIKPCRYPFTSKDGSINAFGLLFFVSLFLEKQDSIWMQKKIPGFKKASENYMKMTNEVFCRNHILLPKIRLETVYDKDWMLLDMLNEVVRCPLSLYKRLTPAAQNKFKVPEKSSDNANRQEDDNPFSRILVRHQNRFPYFVLRFFDLNEVFTTLRFQINLGCYHFAICKKQIGDKKEVHHLIRTLYGFSRLQNFTQNTRPEEWNTLVKTTEPSSGNDGKTVQGVPLPYISYTIPHYQIENEKIGIKIFDGDTAVDTDIWPSVSTEKQLNKPDKYTLTPGFKADVFLSVHELLPMMFYYQLLLCEGMLKTDAGNAVEKVLIDTRNAIFNLYDAFVQEKINTITDLENYLQDKPILIGHLPKQMIDLLKGHQRDMLKAVEQKKAMLIKDTERRLKLLDKQLKQETDVAAKNTGTLLKNGQIADWLVNDMMRFQPVKRDKEGNPINCSKANSTEYQMLQRAFAFYATDSCRLSRYFTQLHLIHSDNSHLFLSRFEYDKQPNLIAFYAAYLKAKLEFLNELQPQNWASDNYFLLLRAPKNDRQKLAEGWKNGFNLPRGLFTEKIKTWFNEHKTIVDISDCDIFKNRVGQVARLIPVFFDKKFKDHSQPFYRYDFNVGNVSKPTEANYLSKGKREELFKSYQNKFKNNIPAEKTKEYREYKNFSLWKKFERELRLIKNQDILIWLMCKNLFDEKIKPKKDILEPRIAVSYIKLDSLQTNTSTAGSLNALAKVVPMTLAIHIDSPKPKGKAGNNEKENKEFTVYIKEEGTKLLKWGNFKTLLADRRIKGLFSYIEHDDIDLKQHPLTKRRVDLELDLYQTCRIDIFQQTLGLEAQLLDKYSDLNTDNFYQMLIGWRKKEGIPRNIKEDTDFLKDVRNAFSHNQYPDSKKIAFRRIRKFNPKEPILEEEEGLGIATQMYKEVEKVVNRIKRIELFD

SEQ ID NO: 19 - protein, 1120 aa, Prevotella intermedia
MEDDKKTTDSIRYELKDKHFWAAFLNLARHNVYITVNHINKILEEDEINRDGYENTLENSWNEIKDINKKDRLSKLIIKHFPFLEATTYRQNPTDTTKQKEEKQAEAQSLESLKKSFFVFIYKLRDLRNHYSHYKHSKSLERPKFEEDLQNKMYNIFDVSIQFVKEDYKHNTDINPKKDFKHLDRKRKGKFHYSFADNEGNITESGLLFFVSLFLEKKDAIWVQKKLEGFKCSNKSYQKMTNEVFCRSRMLLPKLRLESTQTQDWILLDMLNELIRCPKSLYERLQGVNRKKFYVSFDPADEDYDAEQEPFKNTLVRHQDRFPYFALRYFDYNEVFANLRFQIDLGTYHFSIYKKLIGGQKEDRHLTHKLYGFERIQEFDKQNRPDEWKAIVKDSDTFKKKEEKEEEKPYISETTPHYHLENKKIGIAFKNHNIWPSTQTELTNNKRKKYNLGTSIKAEAFLSVHELLPMMFYYLLLKTENTKNDNKVGGKKETKKQGKHKIEAIIESKIKDIYALYDAFANGEINSEDELKEYLKGKDIKIVHLPKQMIAILKNEHKDMAEKAEAKQEKMKLATENRLKTLDKQLKGKIQNGKRYNSAPKSGEIASWLVNDMMRFQPVQKDENGESLNNSKANSTEYQLLQRTLAFFGSEHERLAPYFKQTKLIESSNPHPFLNDTEWEKCSNILSFYRSYLKARKNFLESLKPEDWEKNQYFLMLKEPKTNRETLVQGWKNGFNLPRDFFTEPIRKWFMEHWKSIKVDDLKRVGLVAKVTPLFFSEKYKDSVQPFYNYPFNVGDVNKPKEEDFLHREERIELWDKKKDKFKGYKAKKKFKEMTDKEKEEHRSYLEFQSWNKFERELRLVRNQDIVTWLLCTELIDKLKIDELNIKELKKLRLKDINTDTAKKEKNNILNRVMPMELPVTVYKVNKGGYIIKNKPLHTIYIKEAETKLLKQGNFKALVKDRRLNGLFSFVKTPSEAESESNPISKLRVEYELGKYQNARLDIIEDMLALEKKLIDKYNSLDTDNFHNMLTGWLELKGEAKKARFQNDVKLLTAVRNAFSHNQYPMYDENLFGNIERFSLSSSNIIESKGLDIAAKLKEEVSKAAKKIQNEEDNKKEKET

SEQ ID NO: 20 - protein, 1175 aa, Porphyromonas gulae
MTEQSERPYNGTYYTLEDKHFWAAFLNLARHNAYITLTHIDRQLAYSKADITNDQDVLSFKALWKNFDNDLERKSRLRSLILKHFSFLEGAAYGKKLFESKSSGNKSSKNKELTKKEKEELQANALSLDNLKSILFDFLQKLKDFRNYYSHYRHSGSSELPLFDGNMLQRLYNVFDVSVQRVKIDHEHNDEVDPHYHFNHLVRKGKKDRYGHNDNPSFKHHFVDGEGMVTEAGLLFFVSLFLEKRDAIWMQKKIRGFKGGTETYQQMTNEVFCRSRISLPKLKLESLRMDDWMLLDMLNELVRCPKPLYDRLREDDRACFRVPVDILPDEDDTDGGGEDPFKNTLVRHQDRFPYFALRYFDLKKVFTSLRFHIDLGTYHFAIYKKMIGEQPEDRHLTRNLYGFGRIQDFAEEHRPEEWKRLVRDLDYFETGDKPYISQTSPHYHIEKGKIGLRFMPEGQHLWPSPEVGTTRTGRSKYAQDKRLTAEAFLSVHELMPMMFYYFLLREKYSEEVSAEKVQGRIKRVIEDVYAVYDAFARDEINTRDELDACLADKGIRRGHLPRQMIAILSQEHKDMEEKIRKKLQEMMADTDHRLDMLDRQTDRKIRIGRKNAGLPKSGVIADWLVRDMMRFQPVAKDASGKPLNNSKANSTEYRMLQRALALFGGEKERLTPYFRQMNLTGGNNPHPFLHETRWESHTNILSFYRSYLRARKAFLERIGRSDRVENRPFLLLKEPKTDRQTLVAGWKGEFHLPRGIFTEAVRDCLIEMGHDEVASYKEVGFMAKAVPLYFERACEDRVQPFYDSPFNVGNSLKPKKGRFLSKEERAEEWERGKERFRDLEAWSYSAARRIEDAFAGIEYASPGNKKKIEQLLRDLSLWEAFESKLKVRADRINLAKLKKEILEAQEHPYHDFKSWQKFERELRLVKNQDIITWMMCRDLMEENKVEGLDTGTLYLKDIRPNVQEQGSLNVLNRVKPMRLPVVVYRADSRGHVHKEEAPLATVYIEERDTKLLKQGNFKSFVKDDRLNGLFSFVDTGGLAMEQYPISKLRVEYELAKYQTARVCVFELTLRLEESLLTRYPHLPDESFREMLESWSDPLLAKWPELHGKVRLLIAVRNAFSHNQYPMYDEAVFSSIRKYDPSSPDAIEERMGLNIAHRLSEEVKQAKETVERIIQA

SEQ ID NO: 21 - protein, 1118 aa, Porphyromonas gingivalis
MTEQNEKPYNGTYYTLEDKHFWAAFLNLARHNAYITLAHIDRQLAYSKADITNDEDILFFKGQWKNLDNDLERKARLRSLILKHFSFLEGAAYGKKLFESQSSGNKSSKKKELSKKEKEELQANALSLDNLKSILFDFLQKLKDFRNYYSHYRHPESSELPLFDGNMLQRLYNVFDVSVQRVKRDHEHNDKVDPHRHFNHLVRKGKKDKYGNNDNPFFKHHFVDREGTVTEAGLLFFVSLFLEKRDAIWMQKKIRGFKGGTEAYQQMTNEVFCRSRISLPKLKLESLRTDDWMLLDMLNELVRCPKSLYDRLREEDRARFRVPVDILSDEDDTDGTEEDPFKNTLVRHQDRFPYFALRYFDLKKVFTSLRFHIDLGTYHFAIYKKNIGEQPEDRHLTRNLYGFGRIQDFAEEHRPEEWKRLVRDLDYFETGDKPYITQTTPHYHIEKGKIGLRFVPEGQHLWPSPEVGATRTGRSKYAQDKRLTAEAFLSVHELMPMMFYYFLLREKYSEEVSAEKVQGRIKRVIEDVYAVYDAFARDEINTRDELDACLADKGIRRGHLPRQMIAILSQEHKDMEEKVRKKLQEMIADTDHRLDMLDRQTDRKIRIGTKNAGLPKSGVVADWLVRDMMRFQPVAKDTSGKPLNNSKANSTEYRMLQRALALFGGEKERLTPYFRQMNLTGGNNPHPFLHETRWESHTNILSFYRSYLEARKAFLQSIGRSDRVENHRFLLLKEPKTDRQTLVAGWKGEFHLPRGIFTEAVRDCLIEMGYDEVGSYKEVGFMAKAVPLYFERASKDRVQPFYDYPFNVGNSLKPKKGRFLSKEKRAEEWESGKERFRAKLKKEILEAKEHPYHDFKSWQKFERELRLVKNQDIITWMMCRDLMEENKVEGLDTGTLYLKDIRTDVQEQGSLNVLNRVKPMRLPVVVYRADSRGHVHKEQAPLATVYIEERDTKLLKQGNFKSFVKDRRLNGLFSFVDTGALAMEQYPISKLRVEYELAKYQTARVCAFEQTLELEESLLTRYPHLPDKNFRKMLESWSDPLLDKWPDLHGNVRLLIAVRNAFSHNQYPMYDETLFSSIRKYDPSSPDAIEERMGLNIAHRLSEEVKQAKEMVERIIQA

SEQ ID NO: 22 - protein, 1131 aa, Prevotella intermedia
MEDDKKTKESTNMLDNKHFWAAFLNLARHNVYITVNHINKVLELKNKKDQDIIIDNDQDILAIKTHWEKVNGDLNKTERLRELMTKHFPFLETAIYTKNKEDKEEVKQEKQAKAQSFDSLKHCLFLFLEKLQEARNYYSHYKYSESTKEPMLEKELLKKMYNIFDDNIQLVIKDYQHNKDINPDEDFKHLDRTEEEFNYYFTTNKKGNITASGLLFFVSLFLEKKDAIWMQQKLRGFKDNRESKKKMTHEVFCRSRMLLPKLRLESTQTQDWILLDMLNELIRCPKSLYERLQGEYRKKFNVPFDSADEDYDAEQEPFKNTLVRHQDRFPYFALRYFDYNEIFTNLRFQIDLGTYHFSIYKKLIGGQKEDRHLTHKLYGFERIQEFAKQNRTDEWKAIVKDFDTYETSEEPYISETAPHYHLENQKIGIRFRNDNDEIWPSLKTNGENNEKRKYKLDKQYQAEAFLSVHELLPMMFYYLLLKKEEPNNDKKNASIVEGFIKREIRDIYKLYDAFANGEINNIDDLEKYCEDKGIPKRHLPKQMVAILYDEHKDMAEEAKRKQKEMVKDTKKLLATLEKQTQGEIEDGGRNIRLLKSGEIARWLVNDMMRFQPVQKDNEGNPLNNSKANSTEYQMLQRSLALYNKEEKPTRYFRQBNLINSSNPHPFLKWTKWEECNNILSFYRSYLTKKIEFLNKLKPEDWEKNQYFLKLKEPKTNRETLVQGWKNGFNLPRGIFTEPIREWFKRHQNDSEEYEKVETLDRVGLVTKVIPLFFKKEDSKDKEEYLKKDAQKEINNCVQPFYGFPYNVGNIHKPDEKDFLPSEERKKLWGDKKYKFKGYKAKVKSKLTDKEKEEYRSYLEFQSWNKFERELRLVRNQDIVTWLLCTELIDKLKVEGLNVEELKKLRLKDIDTDTAKQEKNNILNRVMPMQLPVTVYEIDDSHNIVKDRPLHTVYIEETKTKLLKQGNFKALVKDRRLNGLFSFVDTSSETELKSNPISKSLVEYELGEYQNARIETIKDMLLLEETLIEKYKTLPTDNFSDMLNGWLEGKDEADKARFQNDVKLLVAVRNAFSHNQYPMRNRIAFANINPFSLSSADYSEEKKLDIANQLKDKTHKIIKRIIEIEKPIETKE

SEQ ID NO: 23 - protein, 1127 aa, Prevotella buccae
MQKQDKLFVDRKKNAIFAFPKYITIMENKEKPEPIYYELTDKHFWAAFLNLARHNVYTTINHINRRLEIAELKDDGYMMGIKGSWNEQAKKLDKKVRLRDLIMKHFPFLEAAAYEMTNSKSPNNKEQREKEQSEALSLNNLKNVLFIFLEKLQVLRNYYSHYKYSEESPKPIFETSLLKNMYKVFDANVRLVKRDYMHHENIDNQRDFTHLNRKKQVGRTKNIIDSPNFHYHFADKEGNMTIAGLLFFVSLFLDKKDAIWMQKKLKGFKDGRNLREQMTNEVFCRSRISLPKLKLENVQTKDWMQLDMLNELVRCPKSLYERLREKDRESFKVPFDIFSDDYNAEEEPFKNTLVRHQDRFPYFVLRYFDLNEIFEQLRFQIDLGTYHFSIYNKRIGDEDEVRHLTHHLYGFARIQDFAPQNQPEEWRKLVKDLDHFETSQEPYISKTAPHYHLENEKIGIKFCSAHNNLFPSLQTDKTCNGRSKFBLGTQFTAEAFLSVHELLPMMFYYLLLTKDYSRKESADKVEGIIRKEISNIYAIYDAFANNEINSIADLTRRLQNTNILQGHLPKQMISILKGRQKDMGKEAERKIGEMIDDTQRRLDLLCKQTNQKIRIGKRNAGLLKSGKIADWLVNDMMRFQPVQKDQNNIPINNSKANSTEYRMLQRALALFGSENFRLKAYFNQMNLVGNDNPHPFLAETQWEHQTNILSFYRNYLEARKKYLKGLKPQNWKQYQHFLILKVQKTNRNTLVTGWKNSFNLPRGIFTQPIREWFEKHNNSKRIYDQILSFDRVGFVAKAIPLYFAEEYKDNVQPFYDYPFNIGNRLKPKKRQFLDKKERVELWQKNKELFKNYPSEKKKTDLAYLDFLSWKKFERELRLIKNQDIVTWLMFKELFNMATVEGLKIGEIHLRDIDTNTANEESNNILNRIMPMKLPVKTYETDNKGNILKERPLATFYIEETETKVLKQGNFKALVKDRRLNGLFSFAETTDLNLEEHPISKLSVDLELIKYQTTRISIFEMTLGLEKKLIDKYSTLPTDSFRNMLERWLQCKANRPELKNYVNSLIAVRNAFSHNQYPMYDATLFAEVKKFTLFPSVDTKKIELNIAPQLLEIVGKAIKEIEKSENKN

SEQ ID NO: 24 - protein, 1179 aa, Porphyromonas gulae
MTEQSERPYNGTYYTLEDKHFWAAFLNLARHNAYITLTHIDRQLAYSKADITNDQDVLSPKALWKNFDNDLERKSRLRSLILKHFSFLEGAAYGKKLFESKSSGNKSSKNKELTKKEKEELQANALSLDNLKSILFDFLQKLKDFRNYYSHYRHSGSSELPLFDGNMLQRLYNVFDVSVQRVKIDHEHNDEVDPHYHFNHLVRKGKKDRYGHNDNPSFKHHFVDGEGMVTEAGLLFFVSLFLEKRDAIWMQKKIRGFKGGTETYQQMTNEVFCRSRISLPKLKLESLRMDDWMLLDMLNELVRCPKPLYDRLREDDRACFRVPVDILPDEDDTDGGGEDPFKNTLVRHQDRFPYFALRYFDLKKVFTSLRFHIDLGTYHFAIYKKMIGEQPEDRHLTRNLYGFGRIQDFAEEHRPEEWKRLVRDLDYFETGDKPYISQTSPHYHIEKGKIGLRFMPEGQHLWPSPEVGTTRTGRSKYAQDKRLTAEAFLSVHELMPMMFYYFLLREKYSEEVSAERVQGRIKRVIEDVYAVYDAFARARDEINTRDELDACLADKGIRRGHLPRQMIAILSQEHKDMEEKIRKKLQEMMADTDHRLDMLDRQTDRKIRIGRKNAGLPKSGVIADWLVRDMMRFQPVAKDASGKPLNNSKANSTEYRMLQRALALFGGEKERLTPYFRQMNLTGGNNPHPFLHETRWESHTNILSFYRSYLRARKAFLERIGRSDRRVENRPFLLLKEPKTDRQTLVAGWKGEFHLPRGIFTEAVRDCLIEMGHDEVASYKEVGFMAKAVPLYFERACEDRVQPFYDSPFNVGNSLKPKKGRFLSKEERAEEWERGKERFRDLEAWSYSAARRIEDAFAGIEYASPGNKKKIEQLLRDLSLWEAFESKLKVRADRINLAKLKKEILEAQEHPYHDFKSWQKFERELRLVKNQDIITWMMCRDLMEENKVEGLDTGTLYLKDIRPNVQEQGSLNVLNRVKPMRLPVVVYRADSRGHVHKEEAPLATVYIEERDTKLLKQGNFKSFVKDRRLNGLFSFVDTGGLAMEQYPISKLRVEYELAKYQTARVCVFELTLLRLEESLLTRYPHLPDESFREMLESWSDPLLAKWPELHGKVRLLIAVRNAFSHNQYPMYDEAVFSSIRKYDPSSPDAIEERMGLNIAHRLSEEVKQAKETVERIIQA

SEQ ID NO: 25 - protein, 1151 aa, Flavobacterium branchiophilum
MENLNKILDKENEICISKIFNTKGIAAPITEKALDNIKSKQKNDLNKEARLHYFSIGHSFKQIDTKKVFDYVLIEELKDEKPLKFITLQKDFFTKEFSIKLQKLINSIIRNINNHYVHNFNDINLNKIDSNVFHFLKESFELAIIEKYYKVNKKYPLDNEIVLFLKELFIKDENTALLNYFTNLSKDEAIEYILTFTITENKIWNINNEHNILNIEKGKYLTFEAMLFLITIFLYKNEANHLLPKLYDFKNNKSKQELFTFFSKKFTSQDIDAEEGHLIKFRDMIQYLNHYPTAWNNDLKLESENKNKIMTTKLIDSIIEFELNSNYPSFATDIQFKKEAKAFLFASNKKRNQTSFSNKSYNEEIRHNPHIKQYRDEIASALTPISFNVKEDKFKIFVKKHVLEEYFPNSIGYEKFLEYNDFTEKEKEDFGLKLYSNPKTNKLIERIDNHKLVKSHGRNQDRFMDFSMRFLAENNYFGKDAFFKCYKFYDTQEQDEFLQSNENNDDVKFHKGKVTTYIKYEEHLKNYSYWDCPFVEENNSMSVKISIGSEEKILKIQRNLMIYFLENALYNENVENQGYKLVNNYYRELKKDVEESIASLDLIKSNPDFKSKYKKILPKRLLHNYAPAKQDKAPENAFETLLKKADFREEQYKKLLKKAEHEKNKEDFVKRNKGKQFKLHFIRKACQMMYFKEKYNTLKEGNAAFEKKDPVIEKRKNKEHEFGHHKNLNITREEFNDYCKWMFAFNGNDSYKKYLRDLFSEKHFFDNQEYKNLFESSVNLEAFYAKTKELFKKWIETNKPTNNENRYTLENYKNLILQKQVFINVYHFSKYLIDKNLLNSENNVIQYKSLENVEYLISDFYFQSKLSIDQYKTCGKLFNKLKSNKLEDCLLYEIAYNYIDKKNVHKIDIQKILTSKIILTINDANTPYKISVPFNKLERYTEMIAIKNQNNLKARFLIDLPLYLSKNKIKKGKDSAGYEIIIKNDLEIEDINTINNKIINDSVKFTEVLMELEKYFILKDKCILSKNYIDNSEIPSLKQFSKVWIKENENEIINYRNIACHFHLPLLETFDNLLLNVEQKFIKEELQNVSTINDLSKPQEYLILLFIKFKHNNFYLNLFNKNESKTIKNDKEVKKNRVLQKFINQVILKKK

SEQ ID NO: 26 - protein, 954 aa, Alistipes species
MSNEIGAFREHQFAYAPGNEKQEEATFATYFNLALSNVEGMMFGEVESNPDKIEKSLDTLPPAILRQIASFIWLSKEDHPDKAYSTEEVKVIVTDLVRRLCFYRNYFSHCFYLDTQYFYSDELVDTTAIGEKLPYNFHHFITNRLFRYSLPEITLFRWNEGERKYEILRDGLIFFCCLFLKRGQAERFLNELRFFKRTDEEGRIKRTIFTKYCTRESHKHIGIEEQDFLIFQDIIGDLNRVPKVCDGVVDLSKENERYIKNRETSNESDENKARYRLLIREKDKFPYYLMRYIVDFGVLPCITFKQNDYSTKEGRGQFHYQDAAVAQEERCYNFVVRNGNVYYSYMPQAQNVVRISELQGTISVEELRNMVYASINGKDVNKSVEQYLYHLHLLYEKILTISGQTIKEGRVDVEDYRPLLDKLLLRPASNGEELRRELRKLLPKRVCDLLSNRFDCSEGVSAVEKRLKAILLRHEQLLLSQNPALHIDKIKSVIDYLYLFFSDDEKFRQQPTEKAHRGLKDEEFQMYHLVGDYDSHPLALWKELEASGRLKPEMRKLTSATSLHGLYMLCLKGTVEWCRKQLMSIGKGTAKVEAIADRVGLKLYDKLKLKEYTPEQLEREVKLVVMHGYAAAATPKPKAQAAIPSKLTELRFYSFLGKREMSFAAFIRQDKKAQKLWLRNFYTVENIKTLQKRQAAADAACKKLYNLVGEVERVHTNDKVLVLVAQRYRERLLNVGSKCAVTLDNPERQQKLADVYEVQNAWLSIRFDDLDFTLTHVNLSNLRKAYNLIPRKHILAFKEYLDNRVKQKLCEECRNVRRKEDLCTCCSPRYSNLTSWLKENHSESSIEREAATMMLLDVERKLLSFLLDERRKAIIEYGKFIPFSALVKECRLADAGLCGIRNDVLHDNVISYADAIGKLSAYFPKEASEAVEYIRRTKEVREQRREELMANSSQ

SEQ ID NO: 27 - protein, 1200 aa, Capnocytophaga canimorsus
MKNIQRLGKGNEFSPFKKEDKFYFGGFLNLANNNIEDFFKEIITRFGIVITDENKKPKETFGEKILNEIFKKDISIVDYEKWVNIPADYFPFTKYLSLYLEEMQFKNRVICFRDVMKELLKTVEALRNFYTHYDHEPIKIEDRVFYFLDKVLLDVSLTVKNKYLKTDKTKEFLNQHIKEELKELCKQRKDYLVGKGKRIDKESEIINGIYNNAFKDFICKREKQDDKENHNSVEKILCNKEPQNKKQKSSATVWELCSKSSSKYTEKSFPNRENDKHCLEVPISQKGIVFLLSFFLNKGEIYALTSNIKGFKAKITKEEPVTYDKNSIRYMATHRMFSFLAYKGLKRKIRTSEINYNEDGWASSTYEKETLMLQMLDELNKVPDVVYQNLSEDVQKTFIEDWNEYLKENNGDVGTMEEEQVIHPVIRKRYEDKFNYFAIRFLDEFAQFPTLRFQVHLGNYLLCDKRTKQICDTTTEREVKKKITVFGRLSELENKKAIFLNEREEIKGWEVFPNPSYDFPKENISVNYKDFPIVGSILDREKQPVSNKIGIRVKIADELQREIDKAIKEKKLRNPKNRKANQDEKQKERLVNEIVSTNSNEQGEPVVFIGQPTAYLSMNDIHSVLYEFLINKISGEALETKIVEKIETQIKQIIGKDATTKILKPYTNANSNSINREKLLRDLEQEQQILKTLLEEQQQREKDKKDKKSKRKHELYPSEKGKVAVWLANDIKRFMPKAFKEQWRGYHHSLLQKYLAYYEQSKEELKNLLPKEVFKHFPFKLKGYFQQQYLNQFYTDYLKRRLSYVNELLLNIQNFKNDKDALKATEKECFKFFRKQNYIINPINIQIQSILVYPIFLKRGFLDEKPTMIDREKFKENKDTELADWFMHYKNYKEDNYQKFYAYPLEKVEEKEKFKRNKQINKQKKNDVYTLMMVEYIIQKIFGDKFVEENPLVLKGIFQSKAERQQNNTHAATTQERNLNGILNQPKDIKIQGKITVKGVKLKDIGNFRKYEIDQRVNTFLDYEPRKEWMAYLPNDWKEKEKQGQLPPNNVIDRQISKYETVRSKILLKDVQELEKIISDEIKEEHRHDLKQGKYYNFKYYILNGLLRQLKNENVENYKVFKLNTNPEKVNITQLKQEATDLEQKAFVLTYIRNKFAHNQLPKKEFWDYCQEKYGKIEKEKTYAEYFAEVFKREKEALIK

SEQ ID NO: 28 - protein, 1224 aa, Bergeyella zoohelcum
MENKTSLGNNIYYNPFKPQDKSYFAGYFNAAMENTDSVFRELGKRLKGKEYTSENFFDAIFKENISLVEYERYVKLLSDYFPMARLLDKKEVVPIKERKENFKKNFKGIIKAVRDLRNFYTHKEHGEVEITDEIFGVLDEMLKSTVLTVKKKKVKTDKTKEILKKSIEKQLDILCQKKLEYLRDTARKIEEKRRNQRERGEKELVAPFKYSDKRDDLIAAIYNDAFDVYIDKKKDSLKESSKAKYNTKSDPQQEEGDLKIPISKNGVVFLLSLFLTKQEIHAFKSKIAGFKATVIDEATVSEATVSHGKNSICFMATHEIFSHLAYKKLKRKVRTAEINYGEAENAEQLSVYAKETLMMQMLDELSKVPDVVYQNLSEDVQKTFIEDWNEYLKENNGDVGTMEEEQVIHPVIRKRYEDKFNYFAIRFLDEFAQFPTLRFQVHLGNYLHDSRPKENLISDRRIKEKITVFGRLSELEHKKALFIKNTETNEDREHYWEIFPNPNYDFPKENISVNDKDFPIAGSILDREKQPVAGKIGIKVKLLNQQYVSEVDKAVKAHQLKQRKASKPSIQNIIEEIVPINESNPKEAIVFGGQPTAYLSMNDIHSILYEFFDKWEKKKEKLEKKGEKELRKEIGKELEKKIVGKIQAQIQQIIDKDTNAKILKPYQDGNSTAIDKEKLIKDLKQEQNILQKLKDEQTVREKEYNDFIAYQDKNREINKVRDRNHKQYLKDNLKRKYPEAPARKEVLYYREKGKVAVWLANDIKRFMPTDFKNEWKGEQHSLLQKSLAYYEQCKEELKNLLPEKVFQHLPFKLGGYFQQKYLYQFYTCYLDKRLEYISGLVQQAENFKSENKVFKVENECFKFLKKQNYTHKELDARVQSILGYPIFLERGFMDEKPTIIKGKTFKGNEALFADWFRYYKEYQNFQTFYDTENYPLVELEKKQADRKRKTKIYQQKKNDVFTLLMAKHIFKSVFKQDSIDQFSLEDLYQSREERLGNQERARQTGERNTNYIWNKTVDLKLCDGKITVENVKLKNVGDFIKYEYDQRVQAFLKYEENIEWQAFLIKESKEEENYPYVVEREIEQYEKVRREELLKEVHLIEEYILEKVKDKEILKKGDNQNFKYYILNGLLKQLKNEDVESYKVFNLNTEPEDVNINQLKQEATDLEQKAFVLTYIRNKFAHNQLPKKEFWDYCQEKYGKIEKEKTYAEYFAEVFKKEKEALIK

SEQ ID NO: 29 - protein, 1090 aa, Prevotella species
MNIPALVENQKKYFGTYSVMAMLNAQTVLDHIQKVADIEGEQNENNENLWFHPVMSHLYNAKNGYDKQPEKTMFIIERLQSYFPFLKIMAENQREYSNGKYKQNRVEVNSNDIFEVLKRAFGVLKMYRDLTNHYKTYEEKLNDGCEFLTSTEQPLSGMINNYYTVALRNMNERYGYKTEDLAFIQDKRFKFVKDAYGKKKSQVNTGFFLSLQDYNGDTQKKLHLSGVGIALLICLFLDKQYINIFLSRLPIFSSYNAQSEERRIIIRSFGINSIKLPKDRIHSEKSNKSVAMDMLNEVKRCPDELFTTLSAEKQSRFRIISDDHNEVLMKRSSDRFVPLLLQYIDYGKLFDHIRFHVNMGKLRYLLKADKTCIDGQTRVRVIEQPLNGFGRLEEAETMRKQENGTFGNSGIRIRDFENMKRDDANPANYPYIVDTYTHYILENNKVEMFINDKEDSAPLLPVIEDDRYVVKTIPSCRMSTLEIPAMAFHMFLFGSKKTEKLIVDVHNRYKRLFQAMQKEEVTAENIASFGIAESDLPQKILDLISGNAHGKDVDAFIRLTVDDMLTDTERRIKRFKDDRKSIRSADNKMGKRGFKQISTGKLADFLAKDIVLFQPSVNDGENKITGLNYRIMQSAIAVYDSGDDYEAKQQFKLMFEKARLIGKGTTEPHPFLYKVFARSIPANAVEFYERYLIERKFYLTGLSNEIKKGNRVDVPFIRRDQNKWKTPAMKTLGRIYSEDLPVELPRQMFDNEIKSHLKSLPQMEGIDFNNANVTYLIAEYMKRVLDDDFQTFYQWNRNYRYMDMLKGEYDRKGSLQHCFTSVEEREGLWKERASRTERYRKQASNKIRSNRQMRNASSEEIETILDKRLSNSRNEYQKSEKVIRRYRVQDALLFLLAKKTLTELADFDGERFKLKEIMPDAEKGILSEIMPMSFTFEKGGKKYTITSEGMKLKNYGDFFVLASDKRIGNLLELVGSDIVSKEDIMEEFNKYDQCRPEISSIVFNLEKWAFDTYPELSARVDREEKVDFKSILKILLNNKNINKEQSDILRKIRNAFDHNNYPDKGVVEIKALPEIAMSIKKAFGEYAIMK

SEQ ID NO: 30 - protein, 1097 aa, Riemerella anatipestifer
MEKPLLPNVYTLKHKFFWGAFLNIARHNAFITICHINEQLGLKTPSNDDKIVDVVCETWNNILNNDHDLLKKSQLTELILKHFPFLTAMCYHPPKKEGKKKGHQKEQQKEKESEAQSQAEALNPSKLIEALEILVNQLHSLRNYYSHYKHKKPDAEKDIFKHLYKAFDASLRMVKEDYKAHFTVNLTRDFAHLNRKGKNKQDNPDFNRYRFEKDGFFTESGLLFFTNLFLDKRDAYWMLKKVSGFKASHKQREKMTTEVFCRSRILLPKKRLESRYDHNQMLLDMLSELSRCPKLLYEKLSEENKKHFQVEADGFLDEIEEEQNPFKDTLIRHQDRFPYFALRYLDLNESFKSIRFQVDLGTYHYCIYDKKIGDEQEKRHLTRTLLSFGRLQDFTEINRPQEWKALTKDLDYKETSNQPFISKTTPHYHITDNKIGFRLGTSKELYPSLEIKDGANRIAKYPYNSGFVAHAFISVHELLPLMFYQHLTGKSEDLLKETVRHIQRIYKDFEEERINTIEDLEKANQGRLPLGAFPKQMLGLLQNKQPDLSEKAKIKIEKLIAETKLLSHRLNTKLKSSPKLGKRREKLIKTGVLADWLVKDFMRFQPVAYDAQNQPIKSSKANSTEFWFIRRALALYGGEKNRLEGYFKQTNLIGNTNPHPFLNKFNWKACRNLVDFYQQYLEQREKFLEAIKNQPWEPYQYCLLLKIPKENRKNLVKGWEQGGISLPRGLFTEAIRETLSEDLMLSKPIRKEIKKHGRVGFISRAITLYFKEKYQDKHQSFYNLSYKLEAKAPLLKREEHYEYWQQNKPQSPTESQRLELHTSDRWKDYLLYKRWQHLEKKLRLYRNQDDVMLWLMTLELTKNHFKELNLNYHQLKLENLAVNVQEADAKLNPLNQTLPMVLPVKVYPATAFGEVQYHKTPIRTVYIREEEHTKALKMGNFKALVKDRRLNGLFSFIKEENDTQKHPISQLRLRRELEIYQSLRVDAFKETLSLEEKLLNKHTSLSSLENEFRALLEEWKKEYAASSMVTDEHIAFIASVRNAFCHNQYPFYKEALHAPIPLFTVAQPTTEEKDGLGIAEALLKVLREYCEIVKSQI

SEQ ID NO: 31 - protein, 1306 aa, Prevotella species
MSKECKKQRQEKKRRLQKANFSISLTGKHVFGAYFNMARTNFVKTINYILPIAGVRGNYSENQINKMLHALFLIQAGRNEELTTEQKQWEKKLRLNPEQQTKFQKLLFKHFPVLGPMMADVADHKAYLNKKKSTVQTESEAQSQAEALNPSKLIEALEILVNQLHSLRNYYSHYKHKKPDAEKDIFKHLYKAFDASLRMVKEDYKAHFTVNLTRDFAHLNRKGKVKDGKVMKTFVEYDDFYFKISGKRLVNGYTVTTKDDKPVNVNTMLPALSDFGLLYFCVLFLSKPYAKLFIDEVRLFEYSPFDDKENMIMSEMLSIYRIRTPRLHKIDSHDSKATLAMDIFGELRRCPMELYNLLDKNAGQPFFHDEVKHPNSHTPDVSKRLRYDDRFPTLALRYIDETELFKRIRFQLQLGSFRYKFYDKENCIDGRVRVRRIQKEINGYGRMQEVADKRMDKWGDLIQKREERSVKLEHEELYINLDQFLEDTADSTPYVTDRRPAYNIHANRIGLYWEDSQNPKQYKVFDENGMYIPELVVTEDKKAPIKMPAPRCALSVYDLPAMLFYEYLREQQDNEFPSAEQVIIEYEDDYRKFFKAVAEGKLKPFKRPKEFRDFLKKEYPKLRMADIPKKLQLFLFLCSHGLCYNNKPETVYERLDRLTLQHLEERELHIQNRLEHYQKDRDMIGNKDNQYGKKSFSDVRHGALARYLAQSMMEWQPTKLKDKEKGHDKLTGLNYNVLTAYLATYGHPQVPEEGFTPRTLEQQVLINAHLIGGSNPHPFINKVLALGNRNIEELYLHYLEEELKHIRSRIQSLSSNPSDKALSALPFIHHDRMRYHERTSEEMMALAARYTTIQLPDGLFTPYILEILQKHYTENSDLQNALSQDVPVKLNPTCNAAYLITLFYQTVLKDNAQPFYLSDKTYTRNKDGEKAESFSFKRAYELFSVLNNNKKDTFPFEMIPLFLTSDEIQERLSAKLLDGDGNPVPEVGEKGKPATDSQGNTIWKRRIYSEVDDYAEKLTDRDMKISFKGEWEKLPRWKQDKIIKRRDETRRQMRDEKKQRMPRYIRDIKDNERTLRRYKTQDMVLFLLAEKMFTNIISEQSSEFNWKQMRLSKVCNEAFLRQTLTFRVPVTVGETTIYVEQENMSLKNYGEFYRFLTDDRLMSLLNNIVETLKPNENGDLVIRHTDLMSELAAYDQYRSTIFMLIQSIENLIITNNAVLDDPDADGFWVREDLPKRNNFASLLELINQLNNVTDEHIAFIASVRNAFCHNQYNIDFSLIKDVKHLPEVAKGILQHLQSMLGVEITK

SEQ ID NO: 32 - protein, 1152 aa, Prevotella saccharolytica
MEDKPFWAAFFNLARHNVYLTVNHINKLLDLEKLYDEGKHKEIFEREDIFNISDDVMNDANSNGKKRKLDIKKIWDDLDTDLTRKYQLRELILKHFPFIQPAIIGAQTKERTTIDKDKRSTSTSNDSLKQTGEGDINDLLSLSNVKSMFFRLLQILEQLRNYYSHVKHSKSATMPNFDEDLLNWMRYIFIDSVNKVKEDYSSNSVIDPNTSFSHLIYKDEQGKIKPCRYPFTSKDGSINAFGLLFFVSLFLEKQDSIWMQKKIPGFKKASENYMKMTNEVFCRNHILLPKIRLETVYDKDWMLLDMLNEVVRCPLSLYKRLTPAAQNKFKVPEKSSDNANRQEDDNPFSRILVRHHQNRFPYFVLRFFDLNEVFTTLRFQINLGCYHFAICKKQIGDKKEVHHLIRTLYGFSRLQNFTQNTRPEEWNTLVKTTEPSSGNDGKTVQGVPLPYISYTIPHYQIENEKIGIKIFDGDTAVDTDIWPSVSTEQLNKPDKYTLTPGFKADVFLSVHELLPMMFYYQLLLCEGMLKTDAGNAVEKVLIDTRNAIFNLYDAFVQEKINTITDLENYLQDKPILIGHLPKQMIDLLKGHQRDMLKAVEQKKAMLIKDTERRLKLLDKQLKQETDVAAKNTGTLLKNGQIADWLVNDMMRFQPVKRDKEGNPINCSKANSTEYQMLQRAFAFYATDSCRLSRYFTQLHLIHSDNSHLFLSRFEYDKQPNLIAFYAAYLKAKLEFLNELQPQNWASDNYFLLLRAPKNDRQKLAEGWKNGFNLPRGLFTEKIKTWFNEHKTIVDISDCDIFKNRVGQVARLIPVFFDKKFKDHSQPFYRYDFNVGNVSKPTEANYLSKGKREELFKSSYQNKFKNNIPAEKTKEYREYKNFSLWKKFERELRLIKNQDILIWLMCKNLFDEKIKPKKDILEPRIAVSYIKLDSLQTNTSTAGSLNALAKVVPMTLAIHIDSPKPKGKAGNNEKENKEFTVYIKEEGTKLLKWGNFKTLLADRRIKGLFSYIEHDDIDLKQHPLTKRRVDLELDLYQTCRIDIFQQTLGLEAQLLDKYSDLNTDNFYQMLIGWRKKEGIPRNIKEDTDFLKDVRNAFSHNQYPDSKKIAFRRIRKFNPKELILEEEEGLGIATQMYKEVEKVVNRIKRIELFD

SEQ ID NO: 33 - protein, 1118 aa, Porphyromonas gingivalis
MTEQNEKPYNGTYYTLEDKHFWAAFLNLARHNAYITLAHIDRQLAYSKADITNDEDILFFKGQWKNLDNDLERKARLRSLILKHFSFLEGAAYGKKLFESQSSGNKSSKKKELSKKEKEELQANALSLDNLKSILFDFLQKLKDFRNYYSHYRHPESSELPLFDGNMLQRLYNVFDVSVQRVKRDHEHNDKVDPHRHFNHLVRKGKKDKYGNNDNPFFKHHFVDREGTVTEAGLLFFVSLFLEKRDAIWMQKKIRGFKGGTEAYQQMTNEVFCRSRISLPKLKLESLRTDDWMLLDMLNELVRCPKSLYDRLREEDRARFRVPVDILSDEDDTDGTEEDPFKNTLVRHQDRFPYFALRYFDLKKVFTSLRFHIDLGTYHFAIYKKNIGEQPEDRHLTRNLYGFGRIQDFAEEHRPEEWKRLVRDLDYFETGDKPYITQTTPHYHIEKGKIGLRFVPEGQHLWPSPEVGATRTGRSKYAQDKRLTAEAFLSVHELMPMMFYYFLLREKYSEVSAEKVQGRIKRVIEDVYAVYDAFARDEINTRDELDACLADKGIRRGHLPRQMIAILSQEHKDMEEKVRKKLQEMIADTDHRLDMLDRQTDRKIRIGRKNAGLPKSGVVADWLVRDMMRFQPVAKDTSGKPLNNSKANSTEYQMLQRALALFGGEKERLTPYFRQMNLTGGNNPHPFLHETRWESHTNILSFYRSYLEARKAFLQSIGRSDRVENHRFLLLKEPKTDRQTLVAGWKGEFHLPRGIFTEAVRDCLIEMGYDEVGSYKEVGFMAKAVPLYFERASKDRVQPFYDYPFNVGNSLKPKKGRFLSKEKRAEEWESGKERFRLAKLKKEILEAKEHPYHDFKSWQKFERELRLVKNQDIITWMMCRDLMEENKVEGLDTGTLYLKDIRTDVQEQGSLNVLNRVKPMRLPVVVYRADSRGHVHKEQAPLATVYIEERDTKLLKQGNFKSFVKDRRLNGLFSFVDTGALAMEQYPISKLRVEYELAKYQTARVCAFEQTLELEESLLTRYPHLPDKNFRKMLESWSDPLLDKWPDLHGNVRLLIAVRNAFSHNQYPMYDETLFSSIRKYDPSSPDAIEERMGLNIAHRLSEEVKQAKEMVERIIQA

SEQ ID NO: 34 - protein, 1132 aa, Prevotella intermedia
MEDDKKTKESTNMLDNKHFWAAFLNLARHNVYITVNHINKVLELKNKKDQDIIIDNDQDILAIKTHWEKVNGDLNKTERLRELMTKHFPFLETAIYTKNKEDKEEVKQEKQAKAQSFDSLKHCLFLFLEKLQEARNWWSHYKYSESTKEPMLEKELLKKMYNIFDDNIQLVIKDYQHNKDINPDEDFKHLDRTEEEFNYYFTTNKKGNITASGLLFFVSLFLEKKDAIWMQQKLRGFKDNRESKKKMTHEVFCRSRMLLPKLRLESTQTQDWILLDMLNELIRCPKSLYERLQGEYRKKFNVPFDSADEDYDAEQEPFKNTLVRHQDRFPYFALRYFDYNEIFTNLRFQIDLGTYHFSIYKKLIGGQKEDRHLTHKLYGFERIQEFAKQNRTDEWKAIVKDFDTYETSEEPYISETAPHYHLENQKIGIRFRNDNDEIWPSLKTNGENNEKRKYKLDKQYQAEAFLSVHELLPMMFYYLLLKKEEPNNDKKNASIVEGFIKREIRDIYKLYDAFANGEINNIDDLEKYCEDKGIPKRHLPKQMVAILYDEHKDMAEEAKRKQKEMVKDTKKLLATLEKQTQGEIEDGGRNIRLLKSGEIARWLVNDMMRFQPVQKDNEGNPLNNSKANSTEYQMLQRSLALYNKEEKPTRYFRQVNLINSSNPHPFLKWTKWEECNNILSFYRSYLTKKIEFLNKLKPEDWEKNQYFLKLKEPKTNRETLVQGWKNGFNLPRGIFTEPIREWFKRHQNDSEEYEKVETLDRVGLVTKVIPLFFKKEDSKDKEEYLKKDAQKEINNCVQPFYGFPYNVGNIHKPDEKDFLPSEERKKLWGDKKYKFKGYKAKVKSKKLTDKEKEEYRSYLEFQSWNKFERELRLVRNQDIVTWLLCTELIDKLKVEGLNVEELKKLRLKDIDTDTAKQEKNNILNRVMPMELPVTVYEIDDSHNIVKDRPLHTVYIEETKTKLLKQGNFKALVKDRRLNGLFSFVDTSSETELKSNPISKSLVEYELGEYQNARIETIKDMLLLEETLIEKYKTLPTDNFSDMLNGWLEGKDEADKARFQNDVKLLVAVRNAFSHNQYPMRNRIAFANINPFSLSSADTSEEKKLDIANQLKDKTHKIIKRIIEIEKPIETKE

SEQ ID NO: 35 - protein, 1126 aa, Prevotella aurantiaca
MEDDKKTTGSISYELKDKHFWAAFLNLARHNVYITINHINKLLEIREIDNDEKVLDIKTLWQKGNKDLNQKARLRELMTKHFPFLETAIYTKNKEDKKEVKQEKQAEAQSLESLKDCLFLFLDKLQEARNYYSHYKYSEFSKEPEFEEGLLEKMYNIFGNNIQLVINDYQHNKDINPDEDFKHLDRKGQFKYSFADNEGNITESGLLFFVSLFLEKKDAIWMQQKLNGFKDNLENKKKMTHEVFCRSRIILMPKLRLESTQTQDWILLDMLNELIRCPKSLYERLQGDDREKFKVPFDPPADEDYNAEQEPFKNTLIRHQDRFPYFVLRYFDYNEIFKNLRFQIDLGTYHFSIYKKLIGGQKEDRHLTHKLYGFERIQEFAKQNRPDEWKAIVKDLDTYETSNKRYISETTPHYHLENQKIGIRFRNGNKEIWPSLKTNDENNEKSKYKLDKQYQAEAFLSVHELLPMMFYYLLLKKEKPNNDEINASIVEGFIKREIRNIFKLYDAFANGEINNIDDLEKYCADKGIPKRHLPKQMVAILYDEHKDMVKEAKRKQKEMVKDTKKLLATLEKQTQKEKEDDGRNVKLLKSGEIARWLVNDMMRFQPVQKDNEGKPLNNSKANSTEYQMLQRSLALYNNEEKPTRYFRQVNLIESNNPHPFLKWTKWEECNNILTFYYSYLTKKIEFLNKLKPEDWKKNQYFLKLKEPKTNRETLVQGWKNGFNLPRGIFTEPIREWFKRHQNNSKEYEKVEALDRVGLVTKVIPLFFKEEYFKDKEENFKEDTQKEINDCVQPFYNFPYNVGNIHKPKEKPFLHREERIELWDKKKDKFKGYKEKIKSKKLTEKDKEEFRSYLEFQSWNKFERELRLVRNQDIVTWLLCKELIDKLKIDELNIEELKKLRLNNIDTDTAKKEKNNILNRVMPMELPVTVYEIDDSHKIVKDKPLHTIYIKEAETKLLKQGNFKALVDKRRLNGLFSFVKTNSEAESKRNPISKLRVEYELGEYQEARIEIIQDMLALEEKLINKYKDLPTNKFSEMLNSWLEGKDEADKARFQNDVDFLIAVRNAFSHNQYPMHNKIEFANIKPFSLYTANNSEEKGLGIANQLKDKTKETTDKIKKIEKPIETKE

SEQ ID NO: 36 - protein, 1120 aa, Prevotella intermedia
MEDDKKTTDSIRYELKDKHFWAAFLNLARHNVYITVNHINKILEEDEINRDGYENTLENSWNEIKDINKKDRLSKLIIKHFPFLEATTYRQNPTDTTKQKEEKQAEAQSLESLKKSFFVFIYKLRDLRNHYSHYKHSKSLERPKFEEDLQNKMYNIFDVSIQFVKEDYKHNTDINPPKKDFKHLDRKRKGKFHYSFADNEGNITESGLLFFVSLFLEKKDAIWVQKKLEGFKCSNKSYQKMTNEVFCRSRMLLPKLRLESTQTQDWILLDMLNELIRCPKSLYERLQGVNRKKFYVSFDPADEDYDAEQEPFKNTLVRHWDRFPYFALRYFDYNEVFANLRFQIDLGTYHFSIYKKLIGGQKEDRHLTLKLYGFERIQEFDKQNRPDEWKAIVKDSDTFKKKEEKEEEKPYISETTPHYHLENKKIGIAFGNHNIWPSTQTELTNNKRKKYNLGYSIKAEAFLSVHELLPMMFYYLLLKTENTKNDNKVGGKKETGKQGKHKIEAIIESKIKDIYALYDAFANGEINSEDELKEYLKGKDIKIVHLPKQMIAILKNEHKDMAEKAEAKQEKMKLATENRLKTLDKQLKGKIQNGKRYNSAPKSGEIASWLVNDMMFRQPVQKDENGESLNNSKANSTEYQLLQRTLAFFGSEHERLAPYFKQTKLIESSNPHPFLNDTEWEKCSNILSFYRSLKARKNFLESLKPEDWEKNQYFLMLKEPKTNRETLVQGWKNGFNLPRGFFTEPIRKWFMEHWKSIKVDDLKRVGLVAKVTPLFFSEKYKDSVQPFYNYPFNVGDVNKPKEEDFLHREERIELWDKKKDKFKGYKAKKKFKEMTDKEKEEHRSYLEFQSWNKFERELRLVRNQDIVTWLLCTELIDKLKIDELNIKELKKLRLKDINTDTALKEKNNILNRVMPMELPVTVYKVNKGGYIIKNKPLHTIYIKEAETKLLKQGNFKALVKDRRLNGLFSFVKTPSEAESESNPISKLRVEYELGKYQNARLDIIEDMLALEKKLIDKYNSLDTDNFHNMLTGWLELKGEAKKARFQNDVKLLTAVRNAFSHNQYPMYDENLFGNIERFSLSSSNIIESKGLDIAAKLKEEVSKAAKKIQNEEDNKREKET

SEQ ID NO: 37 - protein, 1126 aa, Prevotella intermedia
MEDDKKTTDSIRYELKDKHFWAAFLNLARHNVYITVNHINKILEEGEINRDGYETTLKNTWNEIKDINKKDRLSKLIIKHFPFLEAATYRLNPTDTTKQKEEKQAEAQSLESLRKSFFVFIYKLRDLRNHYSHYKHSKSLERPKFEEGLLEKMYNIFNASIRLVKEDYQYNKDINPDEDFKHLDRTEEEFNYYFTKDNEGNITESGLLFFVSLFLEKKDAIWMQQKLRGFKDNRENKKKMTNEVFCRSRMLLPKLRLQSTQTQDWILLDMLNELIRCPKSLYERLREEDREKFRVPIEIADEDYDAEQEPFKNTLVRHQDRFPYFALRYFDYNEIFTNLRFQIDLGTYHFSIYKKQIGDYKESHHLTHKLYGFERIQEFTKQNRPDEWRKFVKTFNSFETSKEPYIPETTPHYHLENQKIGIRFRNDNDKIWPSLKTNSEKNEKSKYKLDKSFQAEAFLSVHELLPMMFYYLLLKTENTDNDNEIETKKKENKNDKQEKHKIEEIIENKITEIYALYDTFANGEIKSIDELEEYCKGKDIEIGHLPKQMIAILKDEHKVMATEAERKQEEMLVDVQKSLESLDNQINEEIENVERKNSSLKSGKIASWLVNDMMRFQPVQKDNEGKPLNNSKANSTEYQLLQRTLAFFGSEHERLAPYFKQTKLIESSNPHPFLKDTEWEKCNNILSFYRSYLEAKKNFLESLKPEDWEKNQYFLKLKEPKTKPKTLVQGWKNGFNLPRGIFTEPIRKWFMKHRENITVAELKRVGLVAKVIPLFFSEEYKDSVQPFYNYHFNVGNINKPDEKNFLNCEERRELLRKKKDEFKKMTDKEKEENPSYLEFKSWNKFERELRLVRNQDIVTWLLCMELFNKKKIKELNVEKIYLKNINTNTTKKEKNTEEKNGEEKNIKEKNNILNRIMPMRLPIKVYGRENFSKNKKKKIRRNTFFTVYIEEKGTKLLKQGNFKALERDRRLGGLFSFVKTPSKAESKSNTISKLRVEYELGEYQKARIEIIKDMLALEKTLIDKYNSLDTDNFNKMLTDWLELKGEPDRASFQNDVDLLIAVRBAFSHNQYPMRNRIAFANINPFSLSSANTSEEKGLGIANQLKDKTHKTIEKIIEIEKPIETKE

SEQ ID NO: 38 - DNA, 80 bp, Artificial Sequence
  Synthetic Oligonucleotide
cggaagctttggaagtactgaaggatcgtcctttgtacgccgaaaaatgagcaccatttactaaagaattagcagtcatg

SEQ ID NO: 39 - DNA, 80 bp, Artificial Sequence
  Synthetic Oligonucleotide
aatacagtcaaattgcagtactctgcgggtgtatacagaatagcagaataggcagacattacgaatgcacacggtgtggt

SEQ ID NO: 40 - DNA, 33 bp, Artificial Sequence
  Synthetic Oligonucleotide
gctgaagaagcctccgatttgtggggtgattac

SEQ ID NO: 41 - DNA, 33 bp, Artificial Sequence; identical to SEQ ID NO: 40
  Synthetic Oligonucleotide

SEQ ID NO: 42 - DNA, 47 bp, Artificial Sequence
  Synthetic Oligonucleotide
gtaatcactccacaaatcggaggcttcttcagcgtggaaattctgga

SEQ ID NO: 43 - DNA, 36 bp, Artificial Sequence
  Synthetic Oligonucleotide
gtgctggagaagcccccgatttgtggggtgattaca

SEQ ID NO: 44 - DNA, 36 bp, Artificial Sequence; identical to SEQ ID NO: 43
  Synthetic Oligonucleotide

SEQ ID NO: 45 - DNA, 47 bp, Artificial Sequence
  Synthetic Oligonucleotide
tgtaatcaccccacaaatcgggggcttctccagcgccgtaaaagttg

SEQ ID NO: 46 - protein, 248 aa, Artificial Sequence
  Synthetic Peptide
KAAFNARNTHILWDLLKHFPFLEKSLFLLLRNYYSHYKFDIFHLRKITGLLFFVSLFLEKAKGFKTEVFPKLDMLELRCPLYLFFLRDRFPYFALRYDFLRFQLGYHYKIRHLGFRQEITPHYEKIGSKYAELSVELMFYLEILILPKLDKTLLLKGALDMFQPDPNNERAELFLINPHPFNFYYLLLLLVKLPGFTVQPFYFKFEEWWKEELDMLLNLTYIKLLGNFDRLLELYRLLELLVANQYIL

SEQ ID NO: 47 - protein, 801 aa, Artificial Sequence
  Synthetic Peptide
MQVENIKKGSSQGMYSIEQYEGKKWCFAIVLNRAQTNLQGNPKLFEETLTRFERIRKEDWFDQETKKLIYAKQEQNEVEEEIQKAADEKLRDLRNYFSHYFHTPDCLIFTQNDPVRIIMEKAYEKARFEQAKKEQEDISIEFGELFEENGRITSAGVVFFASFFAERRFLNRLMGYVQGFTRTEGEYKITRDVFSTYCLRDSYSVKTPDHDAVMFRDILGYLSRVPSESYQRIKESQMRSETQLSERKTDKFILFALNYLEDYGLEDLADYTACFARTRIKREQDENTDGKEQKPHRKKPRVEIHFERAEGDPFYIKHNNVILRTQKKGAQTYIFRMGVYELKYLVLLSLLGKGAEAVKRIDRYVHSLRNQLPHIEKKSTEEIEGYVRFLPRFVRSHLGLLGVDDEKKIKARVDYVKAKWLEKKEKSRELQLHRKGRDILRYINERCERPLNIDEYNRILELLVTKHLDGFYRELEELKKTRRIDKNIVCNLSRHKSVNALHEKVCDLVVQELESLGREELKEYVGLIPKEEKEVSFEEKTDRVVKQPVIYKGFLRNEFFRESRKSFARLVEEAVREKGEVYDVPLGGEYYEIVSLDTFDKDNKRLYETLAMDRLLLMIARQYHLSLNKELAKRAQQIEWKKEDGEEVIIFTLKNPAQPEQSCSVRFSLRDYTKLYVMDDAEFLARLCDYFLPKDEEQIDYHRLYTQGMNRYTNLQREGIEAILELEKKTIGPEQPRPPKNYIPFSEIMDKSAYNEDDQKALRRVRNALLHHNLNFARADFKRFCGIMKREGIEKRWSLAV

SEQ ID NO: 48 - protein, 775 aa, Artificial Sequence
  Synthetic Peptide
MAQVSKQTSKKRELSIDEYQGARKWCFTIAFNKALVNRDKNDGLFVESLLRHEKYSKHDWYDEDTRALIKCSTQAANAKAEALRNYFSHYRHSPGCLTFTAEDELRTIMERAYERAIFECRRRETEVIIEFPSLFEGDRITTAGVVFFVSFFVERRVLDRLYGAVSGLKKNEGQYKLTRKALSMYCLKDSRFTKAWDKRVLLFRDILAQLGRIPAEAYEYYHGEQGDKKRANDNEGTNPKRHKDKFIEFALHYLEAQHSEICFGRRHIVREEAGAGDEHKKHRTKGKVVVDFSKKDEDQSYYISKNNVIVRIDKNAGPRSYRMGLNELKYLVLLSLQGKGDDAIAKLYRYRQHVENILDVVKVTDKDNHVFLPRFVLEQHGIGRKAFKQRIDGRVKHVRGVWEKKKAATNEMTLHEKARDILQYVNENCTRSFNPGEYNRLLVCLVGKDVENFQAGLKRLQLAERIDGRVYSIFAQTSTINEMHQVVCDQILNRLCRIGDQKLYDYVGLGKKDEIDYKQKVAWFKEHISIRRGFLRKKFWYDSKKGFAKLVEEHLESGGGQRDVGLDKKYYHIDAIGRFEGANPALYETLARDRLCLMMAQYFLGSVRKELGNKIVWSNDSIELPVEGSVGNEKSIVFSVSDYGKLYVLDDAEFLGRICEYFMPHEKGKIRYHTVYEKGFRAYNDLQKKCVEAVLAFEEKVVKAKKMSEKEGAHYIDFREILAQTMCKEAEKTAVNKVRRAFFHHHLKFVIDEFGLFSDVMKKYGIEKEWKFPVK

SEQ ID NO: 49 - protein, 1175 aa, Artificial Sequence
  Synthetic Peptide
MTEQSERPYNGTYYTLEDKHFWAAFLNLARHNAYITLTHIDRQLAYSKADITNDQDVLSFKALWKNFDNDLERKSRLRSLILKHFSFLEGAAYGKKLFESKSSGNKSSKNKELTKKEKEELQANALSLDNLKSILFDFLQKLKDFRNYYSHYRHSGSSELPLFDGNMLQRLYNVFDVSVQRVKIDHEHNDEVDPHYHFNHLVRKGKKDRYGHNDNPSFKHHFVDGEGMVTEAGLLFFVSLFLEKRDAIWMQKKIRGFKGGTETYQQMTNEVFCRSRISLPKLKLESLRMDDWMLLDMLNELVRCPKPLYDRLREDDRACFRVPVDILPDEDDTDGGGEDPFKNTLVRHQDRFPYFALRYFDLKKVFTSLRFHIDLGTYHFAIYKKMIGEQPEDRHLTRNLYGFGRIQDFAEEHRPEEWKRLVRDLDYFETGDKPYISQTSPHYHIEKGKIGLRFMPEGQHLWPSPEVGTTRTGRSKYAQDKRLTAEAFLSVHELMPMMFYYFLLREKYSEEVSAERVQGRIKRVIEDVYAVYDAFARDEINTRDELDACLADKGIRRGHLPRQMIAILSQEHKDMEEKIRKKLQEMMADTDHRLDMLDRQTDRKIRIGRKNAGLPKSGVIADWLVRDMMRFQPVAKDASGKPLNNSKANSTEYRMLQRALALFGGEKERLTPYFRQMNLTGGNNPHPFLHETRWESHTNILSFYRSYLRARKAFLERIGRSDRVENRPFLLLKEPKTDRQTLVAGWKGEFHLPRGIFTEAVRDCLIEMGHDEVASYKEVGFMAKAVPLYFERACEDRVQPFYDSPFNVGNSLKPKKGRFLSKEERAEEWERGKERFRDLEAWSYSAARRIEDAFAGIEYASPGNKKKIEQLLRDLSLWEAFESKLKVRADRINLAKLKKEILEAQEHPYHDFKSWQKFERELRLVKNQDIITWMMCRDLMEENKVEGLDTGTLYLKDIRPNVQEQGSLNVLNRVKPMRLPVVVYRADSRGHVHKEEAPLATVYIEERDTKLLKQGNFKSFVKDRRLNGLFSFVDTGGLAMEQYPISKLRVEYELAKYQTARVCVFELTLRLEESLLTRYPHLPDESFREMLESWSDPLLAKWPELHGKVRLLIAVRNAFSHNQYPMYDEAVFSSIRKYDPSSPDAIEERMGLNIAHRLSEEVKQAKETVERIIQA

SEQ ID NO: 50 - protein, 1119 aa, Artificial Sequence
  Synthetic Peptide
MTEQNEKPYNGTYYTLEDKHFWAAFLNLARHNAYITLAHIDRQLAYSKADITNDEDILFFKGQWKNLDNDLERKARLRSLILKHFSFLEGAAYGKKLFESQSSGNKSSKKKELSKKEKEELQANALSLDNLKSILFDFLQKLKDFRNYYSHYRHPESSELPLFDGNMLQRLYNVFDVSVQRVKRDHEHNDKVDPHRHFNHLVRKGKKDKYGNNDNPFFKHHFVDREGTVTEAGLLFFVSLFLEKRDAIWMQKKIRGFKGGTEAYQQMTNEVFCRSRISLPKLKLESLRTDDWMLLDMLNELVRCPKSLYDRLREEDRARFRVPVDILSDEDDTDGTEEDPFKNTLVRHQDRFPYFALRYFDLKKVFTSLRFHIDLGTYHFAIYKKNIGEQPEDRHLTRNLYGFGRIQDFAEEHRPEEWKRLVRDLDYFETGDKPYITQTTPHYHIEKGKIGLRFVPEGQHLWPSPEVGATRTGRSKYAQDKRLTAEAFLSVHELMPMMFYYFLLREKYSEEVSAEKVQGRIKRVIEDVYAVYDAFARDEINTRDELDACLADKGIRRGHLPRQMIAILSQEHKDMEEKVRKKLQEMIADTDHRLDMLDRQTDRKIRIGRKNAGLPKSGVVADWLVRDMMRFQPVAKDTSGKPLNNSKANSTEYRMLQRALALFGGEKERLTPYFRQMNLTGGNNPHPFLHETRWESHTNILSFYRSYLEARKAFLQSIGRSDRVENHRFLLLKEPKTDRQTLVAGWKGEFHLPRGIFTEAVRDCLIEMGYDEVGSYKEVGFMAKAVPLYFERASKDRVQPFYDYPFNVGNSLKPKKGRFLSKEKRAEEWESGKERFRLAKLKKEILEAKEHPYHDFKSWQKFERELRLVKNQDIITWMMCRDLMEENKVEGLDTGTLYLKDIRTDVQEQGSLNVLNRVKPMRLPVVVYRADSRGHVHKEQAPLATVYIEERDTKLLKQGNFKSFVKDRRLNGLFSFVDTGALAMEQYPISKLRVEYELAKYQTARVCAFEQTLELEESLLTRYPHLPDKNFRKMLESWSDPLLDKWPDLHGNVRLLIAVRNAFSHNQYPMYDETLFSSIRKYDPSSPDAIEERMGLNIAHRLSEEVKQAKEMVERIIQA

SEQ ID NO: 51 - protein, 1127 aa, Artificial Sequence
  Synthetic Peptide
MQKQDKLFVDRKKNAIFAFPKYITIMENKEKPEPIYYELTDKHFWAAFLNLARHNVYTTINHINRRLEIAELKDDGYMMGIKGSWNEQAKKLDKKVRLRDLIMKHFPFLEAAAYEMTNSKSPNNKEQREKEQSEALSLNNLKNVLFIFLEKLQVLRNYYSHYKYSEESPKPIFETSLLKNMYKVFDANVRLVKRDYMHHENIDMQRDFTHLNRKKQVGRTKNIIDSPNFHYHFADKEGNMTIAGLLFFVSLFLDKKDAIWMQKKLKGFKDGRNLREQMTNEVFCRSRISLPKLKLENVQTKDWMQLDMLNELVRCPKSLYERLREKDRESFKVPFDIFSDDYNAEEEPFKNTLVRHQDRFPYFVLRYFDLNEIFEQLRFQIDLGTYHFSIYNKRIGDEDEVRHLTHHLYGFARIQDFAPQNQPEEWRKLVKDLDHFETSQEPYISKTAPHYHLENEKIGIKFCSAHNNLFPSLQTDKTCNGRSKFNLGTQFTAEAFLSVHELLPMMFYYLLLTKDYSRKESADKVEGIIRKEISNIYAIYDAFANNEINSIADLTRRLQNTNILQGHLPKQMISILKGRQKDMGKEAERKIGEMIDDTQRRLDLLCKQTNQKIRIGKRNAGLLKSGKIADWLVNDMMRFQPVQKDQNNIPINNSKANSTEYRMLQRALALFGSENFRLKAYFNQMNLVGNDNPHPFLAETQWEHQTNILSFYRNYLEARKKYLKGLKPQNWKQYQHFLILKVQKTNRNTLVTGWKNSFNLPRGIFTQPIREWFEKHNNSKRIYDQILSFDRVGFVAKAIPLYFAEEYKDNVQPFYDYPFNIGNRLKPKKRQFLDKKERVELWQKNKELFKNYPSEKKKTDLAYLDFLSWKKFERELRLIKNQDIVTWLMFKELFNMATVEGLKIGEIHLRDIDTNTANEESNNILNRIMPMKLPVKTYETDNKGNILKERPLATFYIEETETKVLKQGNFKALVKDRRLNGLFSFAETTDLNLEEHPISKLSVDLELIKYQTTRISIFEMTLGLEKKLIDKYSTLPTDSFRNMLERWLQCKANRPELKNYVNSLIAVRNAFSHNQYPMYDATLFAEVKKFTLFPSVDTKKIELNIAPQLLEIVGKAIKEIEKSENKN

SEQ ID NO: 52 - protein, 1125 aa, Artificial Sequence
  Synthetic Peptide
MEDDKKTTGSISYELKDKHFWAAFLNLARHNVYITINHINKLLEIREIDNDEKVLDIKTLWQKGNKDLNQKARLRELMTKHFPFLETAIYTKNKEDKKEVKQEKQAEAQSLESLKDCLFLFLDKLQEARNYYSHYKYSEFSKEPEFEEGLLEKMYNIFGNNIQLVINDYQHNKDINPDEDFKHLDRKGQFKYSFADNEGNITESGLLFFVSLFLEKKDAIWMQQKLNGFKDNLENKKKMTHEVFCRSRILMPKLRLESTQTQDWILLDMLNELIRCPKSLYERLQGDDREKFKVPFDPADEDYNAEQEPFKNTLIRHQDRFPYFVLRYFDYNEIFKNLRFQIDLGTYHFSIYKKLIGGQKEDRHLTHKLYGFERIQEFAKQNRPDEWKAIVKDLDTYETSNKRYISETTPHYHLENQKIGIKRFRNGNKEIWPSLKTNDENNEKSKYKLDKQYQAEAFLSVHELLPMMFYYLLLKKEKPNNDEINASIVEGFIKREIRNIFKLYDAFANGEINNIDDLEKYCADKGIPKRHLPKQMVAILYDEHKDMVKEAKRKQKEMVKDTKKLLATLEKQTQKEKEDDGRNVKLLKSGEIARWLVNDMMRFQPVQKDNEGKPLNNSKANSTEYQMLQRSLALYNNEEKPTRYFRQVNLIESNNPHPFLKWTKWEECNNILTFYYSYLTKKIEFLNKLKPEDWKKNQYFLKLKEPKTNRETLVQGWKNGFNLPRGIFTEPIREWFKRHQNNSKEYEKVEALDRVGLVTKVIPLFFKEEYFKDKEENFKEDTQKEINDCVQPFYNFPYNVGNIHKPKEKDFLHREERIELWDKKKDKFKGYKEKIKSKKLTEKDKEEFRSYLEFQSWNKFERELRLVRNQDIVTWLLCKELIDKLKIDELNIEELKKLRLNNIDTDTAKKEKNNILNRVMPMELPVTVYEIDDSHKIVKDKPLHTIYIKEAETKLLKQGNFKALVKDRRLNGLFSFVKTNSEAESKRNPISKLRVEYELGEYQEARIEIIQDMLALEEKLINKYKDLPTNKFSEMLNSWLEGKDEADKARFQNDVDFLIAVRNAFSHNQYPMHNKIEFANIKPFSLYTANNSEEKGLGIANQLKDKTKETTDKIKKIEKPIETKE

SEQ ID NO: 53 - protein, 1132 aa, Artificial Sequence
  Synthetic Peptide
MEDDKKTKESTNMLDNKHFWAAFLNLARHNVYITVNHINKVLELKNKKDQDIIIDNDQDILAIKTHWEKVNGDLNKTERLRELMTKHFPFLETAIYTKNKEDKEEVKQEKQAKAQSFDSLKHCLFLFLEKLQEARNYYSHYKYSESTKEPMLEKELLKKMYNIFDDNIQLVIKDYQHNKDINPDEDFKHLDRTEEEFNYYFTTNKKGNITASGLLFFVSLFLEKKDAIWMQQKLRGFKDNRESKKKMTHEVFCRSRMLLPKLRLESTQTQDWILLDMLNELIRCPKSLYERLQGEYRKKFNVPFDSADEDYDAEQEPFKNTLVRHQDRFPYFALRYFDYNEIFTNLRFQIDLGTYHFSIYKKLIGGQKEDRHLTHKLYGFERIQEFAKQNRTDEWKAIVKDFDTYETSEEPYISETAPHYHLENQKIGIRFRNDNDEIWPSLKTNGENNEKRKYKLDKQYQAEAFLSVHELLPMMFYYLLLKKEEPNNDKKNASIVEGFIKREIRDIYKLYDAFANGEINNIDDLEKYCEDKGIPKRHLPKQMVAILYDEHKDMAEEAKRKQKEMVKDTKKLLATLEKQTQGEIEDGGRNIRLLKSGEIARWLVNDMMRFQPVQKDNEGNPLNNSKANSTEYQMLQRSLALYNKEEKPTRYFRQVNLINSSNPHPFLKWTKWEECNNILSFYRSYLTKKIEFLNKLKPEDWEKNQYFLKLKEPKTNRETLVQGWKNGFNLPRGIFTEPIREWFKRHQNDSEEYEKVETLDRVGLVTKVIPLFFKKEDSKDKEEYLKKDAQKEINNCVQPFYGFPYNVGNIHKPDEKDFLPSEERKKLWGDKKYKFKGYKAKVKSKKLTDKEKEEYRSYLEFQSWNKFERELRLVRNQDIVTWLLCTELIDKLKVEGLNVEELKKLRLKDIDTDTAKQEKNNILNRVMPMQLPVTVYEIDDSHNIVKDRPLHTVYIEETKTKLLKQGNFKALVKDRRLNGLFSFVDTSSETELKSNPISKSLVEYELGEYQNARIETIKDMLLLEETLIEKYKTLPTDNFSDMLNGWLEGKDEADKARFQNDVKLLVAVRNAFSHNQYPMRNRIAFANINPFSLSSADTSEEKKLDIANQLKDKTHKIIKRIIEIEKPIETKE

SEQ ID NO: 54 - protein, 1126 aa, Artificial Sequence
  Synthetic Peptide
MEDDKKTTDSIRYELKDKHFWAAFLNLARHNVYITVNHINKILEEGEINRDGYETTLKNTWNEIKDINKKDRLSKLIIKHFPFLEAATYRLNPTDTTKQKEEKQAEAQSLESLRKSFFVFIYKLRDLRNHYSHYKHSKSLERPKFEEGLLEKMYNIFNASIRLVKEDYQYNKDINPDEDFKHLDRTEEEFNYYFTKDNEGNITESGLLFFVSLFLEKKDAIWMQQKLRGFKDNRENKKKMTNEVFCRSRMLLPKLRLQSTQTQDWILLDMLNELIRCPKSLYERLREEDREKFRVPIEIADEDYDAEQEPFKNTLVRHQDRFPYFALRYFDYNEIFTNLRFQIDLGTYHFSIYKKQIGDYKESHHLTHKLYGFERIQEFTKQNRPDEWRKFVKTFNSFETSKEPYIPETTPHYHLENQKIGIRFRNDNDKIWPSLKTNSEKNEKSKYKLDKSFQAEAFLSVHELLPMMFYYLLLKTENTDNDNEIETKKKENKNDKQEKHKIEEIIENKITEIYALYDTFANGEIKSIDELEEYCKGKDIEIGHLPKQMIAILKDEHKVMATEAERKQEEMLVDVQKSLESLDNQINEEIENVERKNSSLKSGKIASWLVNDMMRFQPVQKDNEGKPLNNSKANSTEYQLLQRTLAFFGSEHERLAPYFKQTKLIESSNPHPFLKDTEWEKCNNILSFYRSYLEAKKNFLESLKPEDWEKNQYFLKLKEPKTKPKTLVQGWKNGFNLPRGIFTEPIRKWFMKHRENITVAELKRVGLVAKVIPLFFSEEYKDSVQPFYNYHFNVGNINKPDEKNFLNCEERRELLRKKKDEFKKMTDKEKEENPSYLEFKSWNKFERELRLVRNQDIVTWLLCMELFNKKKIKELNVEKIYLKNINTNTTKKEKNTEEKNGEEKNIKEKNNILNRIMPMRLPIKVYGRENFSKNKKKKIRRNTFFTVYIEEKGTKLLKQGNFKALERDRRLGGLFSFVKTPSKAESKSNTISKLRVEYELGEYQKARIEIIKDMLALEKTLIDKYNSLDTDNFNKMLTDWLELKGEPDKASFQNDVDLLIAVRNAFSHNQYPMRNRIAFANINPFSLSSANTSEEKGLGIANQLKDKTHKTIEKIIEIEKPIETKE

SEQ ID NO: 55 - protein, 1120 aa, Artificial Sequence
  Synthetic Peptide
MEDDKKTTDSIRYELKDKHFWAAFLNLARHNVYITVNHINKILEEDEINRDGYENTLENSWNEIKDINKKDRLSKLIIKHFPFLEATTYRQNPTDTTKQKEEKQAEAQSLESLKKSFFVFIYKLRDLRNHYSHYKHSKSLERPKFEEDLQNKMYNIFDVSIQFVKEDYKHNTDINPKKDFKHLDRKRKGKFHYSFADNEGNITESGLLFFVSLFLEKKDAIWVQKKLEGFKCSNKSYQKMTNEVFCRSRMLLPKLRLESTQTQDWILLDMLNELIRCPKSLYERLQGVNRKKFYVSFDPADEDYDAEQEPFKNTLVRHQDRFPYFALRYFDYNEVFANLRFQIDLGTYHFSIYKKLIGGQKEDRHLTHKLYGFERIQEFDKQNRPDEWKAIVKDSDTFKKKEEKEEEKPYISETTPHYHLENKKIGIAFKNHNIWPSTQTELTNNKRKKYNLGTSIKAEAFLSVHELLPMMFYYLLLKTENTKNDNKVGGKKETKKQGKHKIEAIIESKIKDIYALYDAFANGEINSEDELKEYLKGKDIKIVHLPKQMIAILKNEHKDMAEKAEAKQEKMKLATENRLKTLDKQLKGKIQNGKRYNSAPKSGEIASWLVNDMMRFQPVQKDENGESLNNSKANSTEYQLLQRTLAFFGSEHERLAPYFKQTKLIESSNPHPFLNDTEWEKCSNILSFYRSYLKARKNFLESLKPEDWEKNQYFLMLKEPKTNRETLVQGWKNGFNLPRGFFTEPIRKWFMEHWKSIKVDDLKRVGLVAKVTPLFFSEKYKDSVQPFYNYPFNVGDVNKPKEEDFLHREERIELWDKKKDKFKGYKAKKKFKEMTDKEKEEHRSYLEFQSWNKFERELRLVRNQDIVTWLLCTELIDKLKIDELNIKELKKLRLKDINTDTAKKEKNNILNRVMPMELPVTVYKVNKGGYIIKNKPLHTIYIKEAETKLLKQGNFKALVKDRRLNGLFSFVKTPSEAESESNPISKLRVEYELGKYQNARLDIIEDMLALEKKLIDKYNSLDTDNFHNMLTGWLELKGEAKKARFQNDVKLLTAVRNAFSHNQYPMYDENLFGNIERFSLSSSNIIESKGLDIAAKLKEEVSKAAKKIQNEEDNKKEKET

SEQ ID NO: 56 - protein, 1151 aa, Artificial Sequence
  Synthetic Peptide
MEDKPFWAAFFNLARHNVYLTVNHINKLLDLEKLYDEGKHKEIFEREDIFNISDDVMNDANSNGKKRKLDIKKIWDDLDTDLTRKYQLRELILKHFPFIQPAIIGAQTKERTTIDKDKRSTSTSNDSLKQTGEGDINDLLSLSNVKSMFFRLLQILEQLRNYYSHVKHSKSATMPNFDEDLLNWMRYIFIDSVNKVKEDYSSNSVIDPNTSFSHLIYKDEQGKIKPCRYPFTSKDGSINAFGLLFFVSLFLEKQDSIWMQKKIPGFKKASENYMKMTNEVFCRNHILLPKIRLETVYDKDWMLLDMLNEVVRCPLSLYKRLTPAAQNKFKVPEKSSDNANRQEDDNPFSRILVRHQNRFPYFVLRFFDLNEVFTTLRFQINLGCYHFAICKKQIGDKKEVHHLIRTLYGFSRLQNFTQNTRPEEWNTLVKTTEPSSGNDGKTVQGVPLPYISYTIPHYQIENEKIGIKIFDGDTAVDTDIWPSVSTEKQLNKPDKYTLTPGFKADVFLSVHELLPMMFYYQLLLCEGMLKTDAGNAVEKVLIDTRNAIFNLYDAFVQEKINTITDLENYLQDKPILIGHLPKQMIDLLKGHQRDMLKAVEQKKAMLIKDTERRLKLLDKQLKQETDVAAKNTGTLLKNGQIADWLVNDMMRFQPVKRDKEGNPINCSKANSTEYQMLQRAFAFYATDSCRLSRYFTQLHLIHSDNSHLFLSRFEYDKQPNLIAFYAAYLKAKLEFLNELQPQNWASDNYFLLLRAPKNDRQKLAEGWKNGFNLPRGLFTEKIKTWFNEHKTIVDISDCDIFKNRVGQVARLIPVFFDKKFKDHSQPFYRYDFNVGNVSKPTEANYLSKGKREELFKSYQNKFKNNIPAEKTKEYREYKNFSLWKKFERELRLIKNQDILIWLMCKNLFDEKIKPKKDILEPRIAVSYIKLDSLQTNTSTAGSLNALAKVVPMTLAIHIDSPKPKGKAGNNEKENKEFTVYIKEEGTKLLKWGNFKTLLADRRIKGLFSYIEHDDIDLKQHPLTKRRVDLELDLYQTCRIDIFQQTLGLEAQLLDKYSDLNTDNFYQMLIGWRKKEGIPRNIKEDTDFLKDVRNAFSHNQYPDSKKIAFRRIRKFNPKELILEEEEGLGIATQMYKEVEKVVNRIKRIELFD

SEQ ID NO: 57 - protein, 1095 aa, Artificial Sequence
  Synthetic Peptide
MEKPLLPNVYTLKHKFFWGAFLNIARHNAFITICHINEQLGLKTPSNDDKIVDVVCETWNNILNNDHDLLKKSQLTELILKHFPFLTAMCYHPPKKEGKKKGHQKEQQKEKESEAQSQAEALNPSKLIEALEILVNQLHSLRNYYSHYKHKKPDAEKDIFKHLYKAFDASLRMVKEDYKAHFTVNLTRDFAHLNRKGKNKQDNPDFNRYRFEKDGFFTESGLLFFTNLFLDKRDAYWMLKKVSGFKASHKQREKMTTEVFCRSRILLPKLRLESRYDHNQMLLDMLSELSRCPKLLYEKLSEENKKHFQVEADGFLDEIEEEQNPFKDTLIRHQDRFPYFALRYLDLNESFKSIRFQVDLGTYHYCIYDKKIGDEQEKRHLTRTLLSFGRLQDFTEINRPQEWKALTKDLDYKETSNQPFISKTTPHYHITDNKIGFRLGTSKELYPSLEIKDGANRIAKYPYNSGFVAHAFISVHELLPLMFYQHLTGKSEDLLKETVRHIQRIYKDFEEERINTIEDLEKANQGRLPLGAFPKQMLGLLQNKQPDLSEKAKIKIEKLIAETKLLSHRLNTKLKSSPKLGKRREKLIKTGVLADWLVKDFMRFQPVAYDAQNQPIKSSKANSTEFWFIRRALALYGGEKNRLEGYFKQTNLIGNTNPHPFLNKFNWKACRNLVDFYQQYLEQREKFLEAIKNQPWEPYQYCLLLKIPKENRKNLVKGWEQGGISLPRGLFTEAIRETLSEDLMLSKPIRKEIKKHGRVGFISRAITLYFKEKYQDKHQSFYNLSYKLEAKAPLLKREEHYEYWQQNKPQSPTESQRLELHTSDRWKDYLLYKRWQHLEKKLRLYRNQDVMLWLMTLELTKNHFKELNLNYHQLKLENLAVNVQEADAKLNPLNQTLPMVLPVKVYPATAFGEVQYHKTPIRTVYIREEHTKALKMGNFKALVKDRRLNGLFSFIKEENDTQKHPISQLRLRRELEIYQSLRVDAFKETLSLEEKLLNKHTSLSSLENEFRALLEEWKKEYAASSMVTDEHIAFIASVRNAFCHNQYPFYKEALHAPIPLFTVAQPTTEEKDGLGIAEALLKVLREYCEIVKSQI

SEQ ID NO: 58 - protein, 1224 aa, Artificial Sequence
  Synthetic Peptide
MENKTSLGNNIYYNPFKPQDKSYFAGYFNAAMENTDSVFRELGKRLKGKEYTSENFFDAIFKENISLVEYERYVKLLSDYFPMARLLDKKEVPIKERKENFKKNFKGIIKAVRDLRNFYTHKEHGEVEITDEIFGVLDEMLKSTVLTVKKKKVKTDKTKEILKKSIEKQLDILCQKKLEYLRDTARKIEEKRRNQRERGEKELVAPFKYSDKRDDLIAAIYNDAFDVYIDKKKDSLKESSKAKYNTKSDPQQEEGDLKIPISKNGVVFLLSLFLTKQEIHAFKSKIAGFKATVIDEATVSEATVSHGKNSICFMATHEIFSHLAYKKLKRKVRTAEINYGEAENAEQLSVYAKETLMMQMLDELSKVPDVVYQNLSEDVQKTFIEDWNEYLKENNGDVGTMEEEQVIHPVIRKRYEDKFNYFAIRFLDEFAQFPTLRFQVHLGNYLHDSRPKENLISDRRIKEKITVFGRLSELEHKKALFIKNTETNEDREHYWEIFPNPNYDFPKENISVNDKDFPIAGSILDREKQPVAGKIGIKVKLLNQQYVSEVDKAVKAHQLKQRKASKPSIQNIIEEIVPINESNPKEAIVFGGQPTAYLSMNDIHSILYEFFDKWEKKKEKLEKKGEKELRKEIGKELEKKIVGKIQAQIQQIIDKDTNAKILKPYQDGNSTAIDKEKLIKDLKQEQNILQKLKDEQTVREKEYNDFIAYQDKNREINKVRDRNHKQYLKDNLKRKYPEAPARKEVLYYREKGKVAVWLANDIKRFMPTDFKNEWKGEQHSLLQKSLAYYEQCKEELKNLLPEKVFQHLPFKLGGYFQQKYLYQFYTCYLDKRLEYISGLVQQAENFKSENKVFKKVENECFKFLKKQNYTHKELDARVQSILGYPIFLERGFMDEKPTIIKGKTFKGNEALFADWFRYYKEYQNFQTFYDTENYPLVELEKKQADRKRKTKIYQQKKNDVFTLLMAKHIFKSVFKQDSIDQFSLEDLYQSREERLGNQERARQTGERNTNYIWNKTVDLKLCDGKITVENVKLKNVGDFIKYEYDQRVQAFLKYEENIEWQAFLIKESKEEENYPYVVEREIEQYEKVRREELLKEVHLIEEYILEKVKDKEILKKGDNQNFKYYILNGLLKQLKNEDVESYKVFNLNTEPEDVNINQLKQEATDLEQKAFVLTYIRNKFAHNQLPKKEFWDYCQEKYGKIEKEKTYAEYFAEVFKKEKEALIK

SEQ ID NO: 59 - protein, 1198 aa, Artificial Sequence
  Synthetic Peptide
MKNIQRLGKGNEFSPFKKEDKFYFGGFLNLANNNIEDFFKEIITRFGIVITDENKKPKETFGEKILNEIFKKDISIVDYEKWVNIFADYFPFTKYLSLYLEEMQFKNRVICFRDVMKELLKTVEALRNFYTHYDHEPIKIEDRVFYFLDKVLLDVSLTVKNKYLKTDKTKEFLNQHIGEELKELCKQRKDYLVGKGKRIDKESEIINGIYNNAFKDFICKREKQDDKENHNSVEKILCNKEPQNKKQKSSATVWELCSKSSSKYTEKSFPNRENDKHCLEVPISQKGIVFLLSFFLNKGEIYALTSNIKGFKAKITKEEPVTYDKNSIRYMATHRMFSFLAYKGLKRKIRTSEINYNEDGQASSTYEKETLMLQMLDELNKVPDVVYQNLSEDVQKTFIEDWNEYLKENNGDVGTMEEEQVIHPVIRKRYEDKFNYFAIRFLDEFAQFPTLRFQVHLGNYLCDKRTKQICDTTTEREVKKKITVFGRLSELENKKAIFLNEREEIKGWEVFPNPSYDFPKENISVNYKDFPIVGSILDREKQPVSNKIGIRVKIADELQREIDKAIKEKKLRNPKNRKANQDEKQKERLVNEIVSTNSNEQGEPVVFIGQPTAYLSMNDIHSVLYEFLINKISGEALETKIVEKIETQIKQIIGKDATTKILKPYTNANSNSINREKLLRDLEQEQQILKTLLEEQQQREKDKKDKKSKRKHELYPSEKGKVAVWLANDIKRFMPKAFKEQWRGYHHSLLQKYLAYYEQSKEELKNLLPKEVFKHFPFKLKGYFQQQYLNQFYTDYLKRRLSYVNELLLNIQNFKNDKDALKATEKECFKFFRKQNYIINPINIQIQSILVYPIFLKRGFLDEKPTMIDREKFKENKDTELADWFMHYKNYKDNYQKFYAYPLEKVEEKEKFKRNKQINKQKKNDVYTLMMVEYIIQKIFGDKFVEENPLVLKGIFQSKAERQQNNTHAATTQERNLNGILNQPKDIKIQGKITVKGVKLKDIGNFRKYEIDQRVNTFLDYEPRKEWMAYLPNDWKEKEKQGQLPPNNVIDRQISKYETVRSKILLKDVQELEKIISDEIKEEHRHDLKQGKYYNFKYYILNGLLRQLKNENVENYKVFKLNTNPEKVNITQLKQEATDLEQKAFVLTYIRNKFAHNQLPKKEFWDYCQEKYGKIEKEKTYAEYFAEVFKREKEALIK

SEQ ID NO: 60 - protein, 1322 aa, Artificial Sequence
  Synthetic Peptide
MSKECKKQRQEKKRRLQKANFSISLTGKHVFGAYFNMARTNFVKTINYILPIAGVRGNYSENQINKMLHALFLIQAGRNEELTTEQKQWEKKLRLNPEQQTKFQKLLFKHFPVLGPMMADVADHKAYLNKKKSTVQTEDETFAMLKGVSLADCLDIICLMADTLTECRNFYTHKDPYNKPSQLADQYLHQEMIAKKLDKVVVASRRILKDREGLSVNEVEFLTGIDHLHQEVLKDEFGNAKVKDGKVMKTFVEYDDFYFKISGKRLVNGYTVTTKDDKPVNVNTMLPALSDFGLLYFCVLFLSKPYAKLFIDEVRLFEYSPFDDKENMIMSEMLSIYRIRTPRLHKIDSHDSKATLAMDIFGELRRCPMELYNLLDKNAGQPFFHDEVKHPNSHTPDVSKRLRYDDRFPTLALRYIDETELFKRIRFQLQLGSFRYKFYDKENCIDGRVRVRRIQKEINGYGRMQEVADKRMDKWGDLIQKREERSVKLEHEELYINLDQFLEDTADSTPYVTDRRPAYNIHANRIGLYWEDSQNPKQYKVFDENGMYIPELVVTEDKKAPIKMPAPRCALSVYDLPAMLFYEYLREQQDNEFPSAEQVIIEYEDDYRKFFKAVAEGKLKPFKRPKEFRDFLKKEYPKLRMADIPKKLQLFLCSHGLCYNNKPETVYERLDRLTLQHLEERELHIQNRLEHYQKDRDMIGNKDNQYGKKSFSDVRHGALARYLAQSMMEWQPTKLKDKEKGHDKLTGLNYNVLTAYLATYGHPQVPEEGFTPRTLEQVLINAHLIGGSNPHPFINKVLALGNRNIEELYLHYLEEELKHIRSRIQSLSSNPSDKALSALPFIHHDRMRYHERTSEEMMALAARYTTIQLPDGLFTPYILEILQKHYTENSDLQNALSQDVPVKLNPTCNAAYLITLFYQTVLKDNAQPFYLSDKTYTRNKDGEKAESFSFKRAYELFSVLNNNKKDTFPFEMIPLFLTSDEIQERLSAKLLDGDGNPVPEVGEKGKPATDSQGNTIWKRRIYSEVDDYAEKLTDRDMKISFKGEWEKLPRWKQDKIIKRRDETRRQMRDELLQRMPRYIRDIKDNERTLRRYKTQDMVLFLLAEKMFTNIISEQSSEFNWKQMRLSKVCNEAFLRQTLTFRVPVTVGETTIYVEQENMSLKNYGEFYRFLTDDRLMSLLNNIVETLKPNENGDLVIRHTDLMSELAAYDQYRSTIFMLIQSIENLIITNNAVLDDPDADGFWVREDLPKRNNFASLLELINQLNNVELTDDERKLLVAIRNAFSHNSYNIDFSLIKDVKHLPEVAKGILQHLQSMLGVEITK

SEQ ID NO: 61 - protein, 1090 aa, Artificial Sequence; identical to SEQ ID NO: 29
  Synthetic Peptide

SEQ ID NO: 62 - protein, 849 aa, Artificial Sequence
  Synthetic Peptide
MNDKSTWQLKLHRIVRWSFLRRQRVGCDISHHFDFILVRRSGIKNMEFENIKKTSNKEVYSIEQYEGEKKWCFAIVLNRAQTNLEENPKLFEQTLTRFEKIMKQDWFNEETKKLIYEKEEENKVKEEIQIAASERLKNLRNYFSHYLHAPDCLIFNRNDTIRIIMEKAYEKSRFEAKKKQQEDISIEFPELFEEEDKITSAGVVFFVSFFIERRFLNRLMGYVQGFRKTEGEYNITRQVFSKYCLKDSYSVQAQDHDAVMFRDILGYLSRVPTEIYQHIKLTRKRSQDQLSERKTDKFILFALKYLEDYGLKDLADYTACFARSKIKRENEDTKETDGNKHKFHREKPVVEIHFDKEKQDQFYIKRNNVILKAQKKGGQSNVFRMGVYELKYLVLLSLLGKAEEAIQRIDRYISSLKKQLPYLDKISNEEIQKSINFLPRFVRSRLGLLQVDDEKRLKTRLEYVKAKWTDKKEGSRKLELHRKGRDILRYINERCDRPLSRKEYNNILKFIVNKDFAGFYNELEELKRTRRLDKNIIQKLSGHTTLNALHERVCDLVLQELGSLQSENLKEYIGLIPKEEKEVTFREKVDRILEQPVVYKGFLRYEFFKEDKKSFARLVEEAIKTKWSDFDIPLGEEYYNIPSLDRFDRTNKKLYETLAMDRLCLMMARQYYLRLNEKLAEKAQHIYWKKEDGREVIIFKFQNPKEQKKSFSIRFSILDYTKMYVMDDPEFLSRLWEYFIPKEAKEIDYHKHYARAFDKYTNLQKEGIDAILKLEGRIIERRKIKPAKNYIEFQEIMNRSGYNNDQQVALKRVRNALLHYNLNFEREHLKRFYGVVKREGIEKKWSLIV

SEQ ID NO: 63 - protein, 950 aa, Artificial Sequence
  Synthetic Peptide
MSNEIGAFREHQFAYAPGNEKQEEATFATYFNLALEGMMFGEVESNPDKIEKSLDTLPPAILRQIASFIWLSKEDHPDKAYSTEEVKVIVTDLVRRLCFYRNYFSHCFYLDTQYFYSDELVDTTAIGEKLPYNFHHFITNRLFRYSLPEITLFRWNEGERKYEILRDGLIFFCCLFLKRGQAERFLNELRFFKRTDEEGRIKRTIFTKYCTRESHKHIGIEEQDFLIFQDIIGDLNRVPKVCDGVVDLSKENERYIKNRETSNESDENKARYRLLIREKDKFPYYLMRYIVDFGVLPCITFKQNDYSTKEGRGQFHYQDAAVAQEERCYNFVVRNGNVYYSYMPQAQNVVRISELQGTISVEELRNMVYASINGKDVNKSVEQYLYHLHLLYEKILTISGQTIKEGRVDVEDYRPLLDKLLLRPASNGEELRRELRKLLPKRVCDLLSNRFDCSEGVSAVEKRLKAILLRHEQLLLSQNPALHIDKIKSVIDYLYLFFSDDEKFRQQPTEKAHRGLKDEEFQMYHYLVGDYDSHPLALWKELEASGRLKPEMRKLTSATSLHGLYMLCLKGTVEWCRKQLMSIGKGTAKVEAIADRVGLKLYDKLKEYTPEQLEREVKLVVMHGYAAAATPKPKAQAAIPSKLTELRFYSFLGKREMSFAAFIRQDKKAQKLWLRNFYTVENIKTLQKRQAAADAACKKLYNLVGEVERVHTNDKVLVLVAQRYRERLLNVGSKCAVTLDNPERQQKLADVYEVQNAWLSIRFDDLDFTLTHVNLSNLRKAYNLIPRKHILAFKEYLDNRVKQKLCEECRNVRRKEDLCTCCSPRYSNLTSWLKENHSESSIEREAATMMLLDVERKLLSFLLDERRKAIIEYGKFIPFSALVKECRLADAGLCGIRNDVLHDNVISYADAIGKLSAYFPKEASEAVEYIRRTKEVREQRREELMANSSQ

SEQ ID NO: 64 - protein, 1148 aa, Artificial Sequence
  Synthetic Peptide
MENLNKILDKENEICISKIFNTKGIAAPITEKALDNIKQKNDLNKEARLHYFSIGHSFKQIDTKKVFDYVLIEELKDEKPLKFITLQKDFFTKEFSIKLQKLINSIRNINNHYVHNFNDINLNKIDSNVFHFLKESFELAIIEKYYKVNKKYPLDNEIVLFLKELFIKDENTALLNYFTNLSKDEAIEYILTFTITENKIWNINNEHNILNIEKGKYLTFEAMLFLITIFLYKNEANHLLPKLYDFKNNKSKQELFTFFSKKFTSQDIDAEEGHLIKFRDMIQYLNHYPTAWNNDLKLESENKNKIMTTKLIDSIIEFELNSNYPSFATDIQFKKEAKAFLFASNKKRNQTSFSNKSYNEEIRHNPHIKQYRDEIASALTPISFNVKEDKFKIFVKKHVLEEYFPNSIGYEKFLEYNDFTEKEKEDFGLKLYSNPKTNKLIERIDNHKLVKSHGRNQDRFMDFSMRFLAENNYFGKDAFFKCYKFYDTQEQDEFLQSNENNDDVKFHKGKVTTYIKYEEHLKNYSYWDCPFVEENNSMSVKISIGSEEKILKIQRNLMIYFLENALYNENVENQGYKLVNNYYRELKKDVEESIASLDLIKSNPDFKSKYKKILPKRLLHNYAPAKQDKAPENAFETLLKKADFREEQYKKLLKKAEHEKNKEDFVKRNKGKQFKLHFIRKACQMMYFKEKYNTLKEGNAAFEKKDPVIEKRKNKEHEFGHHKNLNITREEFNDYCKWMFAFNGNDSYKKYLRDLFSEKHFFDNQEYKNLFESSVNLEAFYAKTKELFKKWIETNKPTNNENRYTLENYKNLILQKQVFINVYHFSKYLIDKNLLNSENNVIQYKSLENVEYLISDFYFQSKLSIDQYKTCGKLFNKLKSNKLEDCLLYEIAYNYIDKKNVHKIDIQKILTSKIILTINDANTPYKISVPFNKLERYTEMIAIKNQNNLKARFLIDLPLYLSKNKIKKGKDSAGYEIIIKNDLEIEDINTINNKIINDSVKFTEVLMELEKYFILKDKCILSKNYIDNSEIPSLKQFSKVWIKENENEIINYRNIACHFHLPLLETFDNLLLNVEQKFIKEELQNVSTINDLSKPQEYLILLFIKFKHNNFYLNLFNKNESKTIKNDKEVKKNRVLQKFINQVILKKK

SEQ ID NO: 65 - RNA, 36 nt, Artificial Sequence
  Synthetic Oligonucleotide
ggcugucugaucugccugucccacaucaaucgcacg

SEQ ID NO: 66 - RNA, 66 nt, Artificial Sequence
  Synthetic Oligonucleotide
gugcuagggaugggggacagucagaucauaguuguggaagguccaguuuugggggcuauuacaaca

SEQ ID NO: 67 - RNA, 15 nt, Artificial Sequence
  Synthetic Oligonucleotide
uuccccacauucgac

SEQ ID NO: 68 - RNA, 15 nt, Artificial Sequence
  Synthetic Oligonucleotide
ggccaauguggggaa

SEQ ID NO: 69 - protein, 17 aa, Artificial Sequence
  Synthetic Peptide
PEADPGSAAPYLKTKFI

SEQ ID NO: 70 - DNA, 57 bp, Artificial Sequence
  Synthetic Oligonucleotide
agcatcctgaagctgacccaggtagcgctgccccatacctgaagaccaagtttatct

SEQ ID NO: 71 - DNA, 51 bp, Artificial Sequence
  Synthetic Oligonucleotide
gaaacttggtcttcaggcatggggcagcgctacctgggtcagcttcaggat

SEQ ID NO: 72 - protein, 17 aa, Artificial Sequence
  Synthetic Peptide
TCSNTIDLPMSPRTLDS

SEQ ID NO: 73 - DNA, 57 bp, Artificial Sequence
  Synthetic Oligonucleotide
caacgacctgcagcaataccattgacctgccgatgtccccccgcactttagattcat

SEQ ID NO: 74 - DNA, 31 bp, Artificial Sequence
  Synthetic Oligonucleotide
gtgcgggggcacatcggcaggtcaatggtat

SEQ ID NO: 75 - protein, 17 aa, Artificial Sequence
  Synthetic Peptide
DSGIHSGATTTAPSLSG

SEQ ID NO: 76 - DNA, 57 bp, Artificial Sequence
  Synthetic Oligonucleotide
tacctggactctggaatccattctggtgccactaccacagctccttctctgagtggt

SEQ ID NO: 77 - DNA, 31 bp, Artificial Sequence
  Synthetic Oligonucleotide
gaggagctgtgttagtggcaccagaatggat

SEQ ID NO: 78 - protein, 6 aa, Artificial Sequence
  Synthetic Peptide
  MISC_FEATURE (2)..(2): Xaa = N, H, or K
  MISC_FEATURE (3)..(3): Xaa = R, S, D, E, Q, N, G, or Y
  MISC_FEATURE (4)..(4): Xaa = I, S, T, V, or L
  MISC_FEATURE (5)..(5): Xaa = L, F, N, Y, V, I, S, D, E, or A
RXXXXH

SEQ ID NO: 79 - protein, 15 aa, Artificial Sequence
  Synthetic Peptide
GGGGSGGGGSGGGGS

SEQ ID NO: 80 - protein, 6 aa, SV40 virus
PKKKRK

SEQ ID NO: 81 - protein, 16 aa, Homo sapiens
KRPAATKKAGQAKKKK

SEQ ID NO: 82 - protein, 8 aa, Homo sapiens
PAAKRVKL

SEQ ID NO: 83 - protein, 11 aa, Homo sapiens
RQRRNELKRSP

SEQ ID NO: 84 - protein, 38 aa, Homo sapiens
NQSSNFGPMKGGNFGGRSSGPYGGGGQYFAKPRNQGGY

SEQ ID NO: 85 - protein, 42 aa, Homo sapiens
RMRIZFKNKGKDTAELRRRRVEVSVELRKAKKDEQILKRRNV

SEQ ID NO: 86 - protein, 8 aa, Homo sapiens
VSRKRPRP

SEQ ID NO: 87 - protein, 8 aa, Homo sapiens
PPKKARED

SEQ ID NO: 88 - protein, 8 aa, Homo sapiens
PQPKKKPL

SEQ ID NO: 89 - protein, 12 aa, Mus musculus
SALIKKKKKMAP

SEQ ID NO: 90 - protein, 5 aa, Influenza virus
DRLRR

SEQ ID NO: 91 - protein, 7 aa, Influenza virus
PKQKKRK

SEQ ID NO: 92 - protein, 10 aa, Hepatitis delta virus
RKLKKKIKKL

SEQ ID NO: 93 - protein, 10 aa, Mus musculus
REKKKFLKRR

SEQ ID NO: 94 - protein, 20 aa, Homo sapiens
KRKGDEVDGVDEVAKKKSKK

SEQ ID NO: 95 - protein, 17 aa, Homo sapiens
RKCLQAGMNLEARKTKK

SEQ ID NO: 96 - protein, 15 aa, Artificial Sequence
  Synthetic Peptide
  misc_feature (4)..(4): Xaa can be any naturally occurring amino acid
DKHXFGAFLNLARHN

SEQ ID NO: 97 - protein, 12 aa, Artificial Sequence
  Synthetic Peptide
GLLFFVSLFLDK

SEQ ID NO: 98 - protein, 7 aa, Artificial Sequence
  Synthetic Peptide
  misc_feature (4)..(4): Xaa can be any naturally occurring amino acid
SKIXGFK

SEQ ID NO: 99 - protein, 10 aa, Artificial Sequence
  Synthetic Peptide
  misc_feature (7)..(7): Xaa can be any naturally occurring amino acid
DMLNELXRCP

SEQ ID NO: 100 - protein, 15 aa, Artificial Sequence
  Synthetic Peptide
  misc_feature (2)..(2): Xaa can be any naturally occurring amino acid
  misc_feature (14)..(14): Xaa can be any naturally occurring amino acid
RXZDRFPYFALRYXD

SEQ ID NO: 101 - protein, 10 aa, Artificial Sequence
  Synthetic Peptide
  misc_feature (9)..(9): Xaa can be any naturally occurring amino acid
LRFQVBLGXY

SEQ ID NO: 102 - protein, 10 aa, Artificial Sequence
  Synthetic Peptide
GLLFFVSLFL

SEQ ID NO: 103 - protein, 9 aa, Artificial Sequence
  Synthetic Peptide
  misc_feature (4)..(4): Xaa can be any naturally occurring amino acid
RHQXRFPYF

SEQ ID NO: 104 - protein, 8 aa, Artificial Sequence
  Synthetic Peptide
RHQDRFPY

SEQ ID NO: 105 - protein, 1224 aa, Bergeyella zoohelcum; identical to SEQ ID NO: 58

SEQ ID NO: 106 - protein, 1126 aa, Prevotella intermedia; identical to SEQ ID NO: 54

SEQ ID NO: 107 - protein, 1127 aa, Prevotella buccae; identical to SEQ ID NO: 51

SEQ ID NO: 108 - protein, 1135 aa, Porphyromonas gingivalis
MNTVPASENKGQSRTVEDDPQYFGLYLNLARENLIEVESHVRIKFGKKKLNEESLKQSLLCDHLLSVDRWTKVYGHSRRYLPFLHYFDPDSQIEKDHDSKTGVDPDSAQRLIRELYSLLDFLRNDFSHNRLDGTTFEHLEVSPDISSFITGTYSLACGRAQSRFAVFFKPDDFVLAKNRKEQLISVADGKECLTVSGFAFFICLFLDREQASGMLSRIRGFKRTDENWARAVHETFCDLCIRHPHDRLESSNTKEALLLDMLNELNRCPRILYDMLPEEERAQFLPALDENSMNNLSENSLDEESRLLWDGSSDWAEALTKRIRHQDRFPYLMLRFIEEMDLLKGIRFRVDLGEIELDSYSKKVGRNGEYDRTITDHALAFGKLSDFQNEEEVSRMISGEASYPVRFSLFAPRYAIYDNKIGYCHTSDPVYPKSKTGEKRALSNPQSMGFISVHDLRKLLLMELLCEGSFSRMQSDFLRKANRILDETAEGKLQFSALFPEMRHRFIPPQNPKSKDRREKAETTLEKYKQEIKGRKDKLNSQLLSAFDMDQRQLPSRLLDEWMNIRPASHSVKLRTYVKQLNEDCRLRLRKFRKDGDGKARAIPLVGEMATFLSQDIVRMIISEETKKLITSAYYNEMQRSLAQYAGEENRRQFRAIVAELRLLDPSSGHPFLSATMETAHRYTEGFYKCYLEKKREWLAKIFYRPEQDENTKRRISVFFVPDGEARKLLPLLIRRRMKEQNDLQDWIRNKQAHPIDLPSHLFDSKVMELLKVKDGKKKWNEAFKDWWSTKYPDGMQPFYGLRRELNIHGKSVSYIPSDGKKFADCYTHLMEKTVRDKKRELRTAGKPVPPDLAADIKRSFHRAVNEREFMLRLVQEDDRLMLMAINKMMTDREEDILPGLKNIDSILDEENQFSLAVHAKVLEKEGEGGDNSLSLVPATIEIKSKRKDWSKYIRYRYDRRVPGLMSHFPEHKATLDEVKTLLGEYDRCRIKIFDWAFALEGAIMSDRDLKPYLHESSSREGKSGEHSTLVKMLVEKKGCLTPDESQYLILIRNKAAHNQFPCAAEMPLIYRDVSAKVGSIEGSSAKDLPEGSSLVDSLWKKYEMIIRKILPILDPENRFFGKLLNNMSQPINDL

SEQ ID NO: 109 - protein, 1115 aa, Bacteroides pyogenes
MESIKNSQKSTGKTLQKDPPYFGLYLNMALLNVRKVENHIRKWLGDVALLPEKSGFHSLLTTDNLSSAKWTRFYYKSRKFLPFLEMFDSDKKSYENRRETAECLDTIDRQKISSLLKEVYGKLQDIRNAFSHYHIDDQSVKHTALIISSEMHRFIENAYSFALQKTRARFTGVFVETDFLQAEEKGDNKKFFAIGGNEGIKLKDNALIFLICLFLDREEAFKFLSRATGFKSTKEKGFLAVRETFCALCCRQPHERLLSVNPREALLMDMLNELNRCPDILFEMLDEKDQKSFLPLLGEEEQAHILENSLNDELCEAIDDPFEMIASLSKRVRYKNRFPYLMLRYIEEKNLLPFIRFRIDLGCLELASYPKKMGEENNYERSVTDHAMAFGRLTDFHNEDAVLQQITKGITDEVRFSLYAPRYAIYNNKIGFVRTSGSDKISFPTLKKKGGEGHCVAYTLQNTKSFGFISIYDLRKILLLSFLDKDKAKNIVSGLLEQCEKHWKDLSENLFDAIRTELQKEFPVPLIRYTLPRSKGGKLVSSKLADKQEKYESEFERRKEKLTEILSEKDFDLSQIPRRMIDEWLNVLPTSREKKLKGYVETLKLDCRERLRVFEKREKGEHPLPPRIGEMATDLAKDIIRMVIDQGVKQRITSAYYSEIQRCLAQYAGDDNRRHLDSIIRELRLKDTKNGHPFLGKVLRPGLGHTEKLYQRYFEEKKEWLEATFYPAASPKRVPRFVNPPTGKQKELPLIIRNLMKERPEWRDWKQRKNSHPIDLPSQLFENEICRLLKDKIGKEPSGKLKWNEMFKLYWDKEFPNGMQRFYRCKRRVEVFDKVVEYEYSEEGGNYKKYYEALIDEVVRQKISSSKEKSKLQVEDLTLSVRRVFKRAINEKEYQLRLLCEDDRLLFMAVRDLYDWKEAQLDLDKIDNMLGEPVSVSQVIQLEGGQPDAVIKAECKLKDVSKLMRYCYDGRVKGLMPYFANHEATQEQVEMELRHYEDHRRRVFNWVFALEKSVLKNEKLRRFYEESQGGCEHRRCIDALRKASLVSEEEYEFLVHIRNKSAHNQFPDLEIGKLPPNVTSGFCECIWSKYKAIICRIIPFIDPERRFFGKLLEQK

SEQ ID NO: 110 - protein, 953 aa, Alistipes species
MSNEIGAFREHQFAYAPGNEKQEEATFATYFNLALSNVEGMMFGEVESNPDKIEKSLDTLPPAILRQIASFIWLSKEDHPDKAYSTEEVKVIVTDLVRRLCFYRNYFSHCFYLDTQYFYSDELVDTTAIGEKLPYNFHHFITNRLFRYSLPEITLFRWNEGERKYEILRDGLIFFCCLFLKRGQAERFLNELRFFKRTDEEGRIKRTIFTKYCTRESHKHIGIEEQDFLIFQDIIGDLNRVPKVCDGVVDLSKENERYIKNRETSNESDENKARYRLLIREKDKFPYYLMRYIVDFGVLPCITFKQNDYSTKEGRGQFHYQDAAVAQEERCYNFVVRNGNVYYSYMPQAQNVVRISELQGTISVEELRNMVYASINGKDVNKSVEQYLYHLHLLYEKILTISGQTIKEGRVDVEDYRPLLDKLLLRPASNGEELRRELRKLLPKRVCDLLSNRFDCSEGVSAVEKRLKAILLRHEQLLLSQNPALHIDKIKSVIDYLYLFFSDDEKFRQQPTEKAHRGLKDEEFQMYHYLVGDYDSHPLALWKELEASGRLKPEMRKLTSATSLHGLYMLCLKGTVEWCRKQLMSIGKGTAKVEAIADRVGLKLYDKLKEYTPEQLEREVKLVVMHGYAAAATPKPKAQAAIPSKLTELRFYSFLGKREMSFAAFIRQDKKAQKLWLRNFYTVENIKTLQKRQAAADAACKKLYNLVGEVERVHTNDKVLVLVAQRYRERLLNVGSKCAVTLDNPERQQKLADVYEVQNAWLSIRFDDLDFTLTHVNLSNLRKAYNLIPRKHILAFKEYLDNRVKQKLCEECRNVRRKEDLCTCCSPRYSNLTSWLKENHSESSIEREAATMMLLDVERKLLSFLLDERRKAIIEYGKFIPFSALVKECRLADAGLCGIRNDVLHDNVISYADAIGKLSAYFPKEASEAVEYIRRTKEVREQRREELMANSSQ

SEQ ID NO: 111 - protein, 1322 aa, Prevotella species; identical to SEQ ID NO: 60

SEQ ID NO: 112 - protein, 1322 aa, Prevotella species; identical to SEQ ID NO: 60

SEQ ID NO: 113 - protein, 1095 aa, Riemerella anatipestifer; identical to SEQ ID NO: 57

SEQ ID NO: 114 - protein, 1124 aa, Prevotella aurantiaca
MEDDKKTTGSISYELKDKHFWAAFLNLARHNVYITINHINKLLEIREIDNDEKVLDIKTLWQKGNKDLNQKARLRELMTKHFPFLETAIYTKNKEDKKEVKQEKQAEAQSLESLKDCLFLFLDKLQEARNYYSHYKYSEFSKEPEFEEGLLEKMYNIFGNNIQLVINDYQHNKDINPDEDFKHLDRKGQFKYSFADNEGNITESGLLFFVSLFLEKKDAIWMQQKLNGFKDNLENKKKMTHEVFCRSRILMPKLRLESTQTQDWILLDMLNELIRCPKSLYERLQGDDREKFKVPFDPADEDYNAEQEPFKNTLIRHQDRFPYFVLRYFDYNEIFKNLRFQIDLGTYHFSIYKKLIGGQKEDRHLTHKLYGFERIQEFAKQNRPDEWKAIVKDLDTYETSNKRYISETTPHYHLENQKIGIRFRNGNKEIWPSLKTNDENNEKSKYKLDKQYQAEAFLSVHELLPMMFYYLLLKKEKPNNDEINASIVEGFIKREIRNIFKLYDAFANGEINNIDDLEKYCADKGIPKRHLPKQMVAILYDEHKDMVKEAKRKQKEMVKDTKKLLATLEKQTQKEKEDDGRNVKLLKSGEIARWLVNDMMRFQPVQKDNEGKPLNNSKANSTEYQMLQRSLALYNNEEKPTRYFRQVNLIESNNPHPFLKWTKWEECNNILTFYYSYLTKKIEFLNKLKPEDWKKNQYFLKLKEPKTNRETLVQGWKNGFNLPRGIFTEPIREWFKRHQNNSKEYEKVEALDRVGLVTKVIPLFFKEEYFKDKEENFKEDTQKEINDCVQPFYNFPYNVGNIHKPKEKDFLHREERIELWDKKKDKFKGYKEKIKSKKLTEKDKEEFRSYLEFQSWNKFERELRLVRNQDIVTWLLCKELIDKLKIDELNIEELKKLRLNNIDTDTAKKEKNNILNRVMPMELPVTVYEIDDSHKIVKDKPLHTIYIKEAETKLLKQGNFKALVKDRRLNGLFSFVKTNSEAESKRNPISKLRVEYELGEYQEARIEIIQDMLALEEKLINKYKDLPTNKFSEMLNSWLEGKDEADKARFQNDVDFLIAVRNAFSHNQYPMHNKIEFANIKPFSLYTANNSEEKGLGIANQLKDKTKETTDKIKKIEKPIETKE

SEQ ID NO: 115 - protein, 1151 aa, Prevotella saccharolytica; identical to SEQ ID NO: 56

SEQ ID NO: 116 - protein, 1159 aa, Myroides odoratimimus
MKDILTTDTTEKQNRFYSHKIADKYFFGGYFNLASNNIYEVFEEVNKRNTFGKLAKRDNGNLKNYIIHVFKDELSISDFEKRVAIFASYFPILETVDKKSIKERNRTIDLTLSQRIRQFREMLISLVTAVDQLRNFYTHYHHSDIVIENKVLDFLNSSFVSTALHVKDKYLKTDKTKEFLKETIAAELDILIEAYKKKQIEKKNTRFKANKREDILNAIYNEAFWSFINDKDKDKDKETVVAKGADAYFEKNHHKSNDPDFALNISEKGIVYLLSFFLTNKEMDSLKANLTGFKGKVDRESGNSIKYMATQRIYSFHTYRGLKQKIRTSEEGVKETLLMQMIDELSKVPNVVYQHLSTTQQNSFIEDWNEYYKDYEDDVETDDLSRVIHPVIRKRYEDRFNYFAIRFLDEFFDFPTLRFQVHLGDYVHDRRTKQLGKVESDRIIKEKVTVFARLKDINSAKASYFHSLEEQDKEELDNKWTLFPNPSYDFPKEHTLQHQGEQKNAGKIGIYVKLRDTQYKEKAALEEARKSLNPKERSATKASKYDIITQIIEANDNVKSEKPLVFTGQPIAYLSMNDIHSMLFSLLTDNAELKKTPEEVEAKLIDQIGKQINEILSKDTDTKILKKYKDNDLKETDTDKITRDLARDKEEIEKLILEQKQRADDYNYTSSTKFNIDKSRKRKHLLFNAEKGKIGVWLANDIKRFMFKESKSKWKGYQHTELQKLFAYFDTSKSDLELILSNMVMVKDYPIELIDLVKKSRTLVDFLNKYLEARLEYIENVITRVKNSIGTPQFKTVRKECFTFLKKSNYTVVSLDKQVERILSMPLFIERGFMDDKPTMLEGKSYKQHKEKFADWFVHYKENSNYQNFYDTEVYEITTEDKREKAKVTKKIKQQQKNDVFTLMMVNYMLEEVLKLSSNDRLSLNELYQTKEERIVNKQVAKDTQERNKNYIWNKVVDLQLCDGLVHIDNVKLKDIGNFRKYENDSRVKEFLTYQSDIVWSAYLSNEVDSNKLYVIERQLDNYESIRSKELLKEVQEIECSVYNQVANKESLKQSGNENFKQYVLQGLLPIGMDVREMLILSTDVKFKKEEIIQLGQAGEVEQDLYSLIYIRNKFAHNQLPIKEFFDFCENNYRSISDNEYYAEYYMEIFRSIKEKYAN

SEQ ID NO: 117 - protein, 1120 aa, Prevotella intermedia; identical to SEQ ID NO: 55

SEQ ID NO: 118 - protein, 1199 aa, Capnocytophaga canimorsus
MKNIQRLGKGNEFSPFKKEDKFYFGGFLNLANNNIEDFFKEIITRFGIVITDENKKPKETFGEKILNEIFKKDISIVDYEKWVNIFADYFPFTKYLSLYLEEMQFKNRVICFRDVMKELLKTVEALRNFYTHYDHEPIKIEDRVFYFLDKVLLDVSLTVKNKYLKTDKTKEFLNQHIGEELKELCKQRKDYLVGKGKRIDKESEIINGIYNNAFKDFICKREKQDDKENHNSVEKILCNKEPQNKKQKSSATVWELCSKSSSKYTEKSFPNRENDKHCLEVPISQKGIVFLLSFFLNKGEIYALTSNIKGFKAKITKEEPVTYDKNSIRYMATHRMFSFLAYKGLKRKIRTSEINYNEDGQASSTYEKETLMLQMLDELNKVPDVVYQNLSEDVQKTFIEDWNEYLKENNGDVGTMEEEQVIHPVIRKRYEDKFNYFAIRFLDEFAQFPTLRFQVHLGNYLCDKRTKQICDTTTEREVKKKITVFGRLSELENKKAIFLNEREEIKGWEVFPNPSYDFPKENISVNYKDFPIVGSILDREKQPVSNKIGIRVKIADELQREIDKAIKEKKLRNPKNRKANQDEKQKERLVNEIVSTNSNEQGEPVVFIGQPTAYLSMNDIHSVLYEFLINKISGEALETKIVEKIETQIKQIIGKDATTKILKPYTNANSNSINREKLLRDLEQEQQILKTLLEEQQQREKDKKDKKSKRKHELYPSEKGKVAVWLANDIKRFMPKAFKEQWRGYHHSLLQKYLAYYEQSKEELKNLLPKEVFKHFPFKLKGYFQQQYLNQFYTDYLKRRLSYVNELLLNIQNFKNDKDALKATEKECFKFFRKQNYIINPINIQIQSILVYPIFLKRGFLDEKPTMIDREKFKENKDTELADWFMHYKNYKEDNYQKFYAYPLEKVEEKEKFKRNKQINKQKKNDVYTLMMVEYIIQKIFGDKFVEENPLVLKGIFQSKAERQQNNTHAATTQERNLNGILNQPKDIKIQGKITVKGVKLKDIGNFRKYEIDQRVNTFLDYEPRKEWMAYLPNDWKEKEKQGQLPPNNVIDRQISKYETVRSKILLKDVQELEKIISDEIKEEHRHDLKQGKYYNFKYYILNGLLRQLKNENVENYKVFKLNTNPEKVNITQLKQEATDLEQKAFVLTYIRNKFAHNQLPKKEFWDYCQEKYGKIEKEKTYAEYFAEVFKREKEALIK

SEQ ID NO: 119 - protein, 1175 aa, Porphyromonas gulae; identical to SEQ ID NO: 49

SEQ ID NO: 120 - protein, 1090 aa, Prevotella species; identical to SEQ ID NO: 29

SEQ ID NO: 121 - protein, 1150 aa, Flavobacterium branchiophilum
MENLNKILDKENEICISKIFNTKGIAAPITEKALDNIKSKQKNDLNKEARLHYFSIGHSFKQIDTKKVFDYVLIEELKDEKPLKFITLQKDFFTKEFSIKLQKLINSIRNINNHYVHNFNDINLNKIDSNVFHFLKESFELAIIEKYYKVNKKYPLDNEIVLFLKELFIKDENTALLNYFTNLSKDEAIEYILTFTITENKIWNINNEHNILNIEKGKYLTFEAMLFLITIFLYKNEANHLLPKLYDFKNNKSKQELFTFFSKKFTSQDIDAEEGHLIKFRDMIQYLNHYPTAWNNDLKLESENKNKIMTTKLIDSIIEFELNSNYPSFATDIQFKKEAKAFLFASNKKRNQTSFSNKSYNEEIRHNPHIKQYRDEIASALTPISFNVKEDKFKIFVKKHVLEEYFPNSIGYEKFLEYNDFTEKEKEDFGLKLYSNPKTNKLIERIDNHKLVKSHGRNQDRFMDFSMRFLAENNYFGKDAFFKCYKFYDTQEQDEFLQSNENNDDVKFHKGKVTTYIKYEEHLKNYSYWDCPFVEENNSMSVKISIGSEEKILKIQRNLMIYFLENALYNENVENQGYKLVNNYYRELKKDVEESIASLDLIKSNPDFKSKYKKILPKRLLHNYAPAKQDKAPENAFETLLKKADFREEQYKKLLKKAEHEKNKEDFVKRNKGKQFKLHFIRKACQMMYFKEKYNTLKEGNAAFEKKDPVIEKRKNKEHEFGHHKNLNITREEFNDYCKWMFAFNGNDSYKKYLRDLFSEKHFFDNQEYKNLFESSVNLEAFYAKTKELFKKWIETNKPTNNENRYTLENYKNLILQKQVFINVYHFSKYLIDKNLLNSENNVIQYKSLENVEYLISDFYFQSKLSIDQYKTCGKLFNKLKSNKLEDCLLYEIAYNYIDKKNVHKIDIQKILTSKIILTINDANTPYKISVPFNKLERYTEMIAIKNQNNLKARFLIDLPLYLSKNKIKKGKDSAGYEIIIKNDLEIEDINTINNKIINDSVKFTEVLMELEKYFILKDKCILSKNYIDNSEIPSLKQFSKVWIKENENEIINYRNIACHFHLPLLETFDNLLLNVEQKFIKEELQNVSTINDLSKPQEYLILLFIKFKHNNFYLNLFNKNESKTIKNDKEVKKNRVLQKFINQVILKKK

SEQ ID NO: 122 - protein, 1159 aa, Myroides odoratimimus
MKDILTTDTTEKQNRFYSHKIADKYFFGGYFNLASNNIYEVFEEVNKRNTFGKLAKRDNGNLKNYIIHVFKDELSISDFEKRVAIFASYFPILETVDKKSIKERNRTIDLTLSQRIRQFREMLISLVTAVDQLRNFYTHYHHSDIVIENKVLDFLNSSFVSTALHVKDKYLKTDKTKEFLKETIAAELDILIEAYKKKQIEKKNTRFKANKREDILNAIYNEAFWSFINDKDKDKDKETVVAKGADAYFEKNHHKSNDPDFALNISEKGIVYLLSFFLTNKEMDSLKANLTGFKGKVDRESGNSIKYMATQRIYSFHTYRGLKQKIRTSEEGVKETLLMQMIDELSKVPNVVYQHLSTTQQNSFIEDWNEYYKDYEDDVETDDLSRVTHPVIRKRYEDRFNYFAIRFLDEFFDFPTLRFQVHLGDYVHDRRTKQLGKVESDRIIKEKVTVFARLKDINSAKASYFHSLEEQDKEELDNKWTLFPNPSYDFPKEHTLQHQGEQKNAGKIGIYVKLRDTQYKEKAALEEARKSLNPKERSATKASKYDIITQIIEANDNVKSEKPLVFTGQPIAYLSMNDIHSMLFSLLTDNAELKKTPEEVEAKLIDQIGKQINEILSKDTDTKILKKYKDNDLKETDTDKITRDLARDKEEIEKLILEQKQRADDYNYTSSTKFNIDKSRKRKHLLFNAEKGKIGVWLANDIKRFMFKESKSKWKGYQHIELQKLFAYFDTSKSDLELILSNMVMVKDYPIELIDLVKKSRTLVDFLNKYLEARLEYIENVITRVKNSIGTPQFKTVRKECFTFLKKSNYTVVSLDKQVERILSMPLFIERGFMDDKPTMLEGKSYKQHKEKFADWFVHYKENSNYQNFYDTEVYEITTEDKREKAKVTKKIKQQQKNDVFTLMMVNYMLEEVLKLSSNDRLSLNELYQTKEERIVNKQVAKDTQERNKNYIWNKVVDLQLCDGLVHIDNVKLKDIGNFRKYENDSRVKEFLTYQSDIVWSAYLSNEVDSNKLYVIERQLDNYESIRSKELLKEVQEIECSVYNQVANKESLKQSGNENFKQYVLQGLLPIGMDVREMLILSTDVKFKKEEIIQLGQAGEVEQDLYSLIYIRNKFAHNQLPIKEFFDFCENNYRSISDNEYYAEYYMEIFRSIKEKYAN

SEQ ID NO: 123 - protein, 1214 aa, Flavobacterium columnare
MSSKNESYNKQKTFNHYKQEDKYFFGGFLNNADDNLRQVGKEFKTRINFNHNNNELASVFKDYFNKEKSVAKREHALNLLSNYFPVLERIQKHTNHNFEQTREIFELLLDTIKKLRDYYTHHYHKPITINPKIYDFLDDTLLDVLITIKKKKVKNDTSRELLKEKLRPELTQLKNQKREELIKKGKKLLEENLENAVFNHCLIPFLEENKTDDKQNKTVSLRKYRKSKPNEETSITLTQSGLVFLMSFFLHRKEFQVFTSGLERFKAKVNTIKEEEISLNKNNIVYMITHWSYSYYNFKGLKHRIKTDQGVSTLEQNNTTHSLTNTNTKEALLTQIVDYLSKVPNEIYETLSEKQQKEFEEDINEYMRENPENEDSTFSSIVSHKVIRKRYENKFNYFAMRFLDEYAELPTLRFMVNFGDYIKDRQKKILESIQFDSERIIKKEIHLFEKLSLVTEYKKNVYLKETSNIDLSRFPLFPNPSYVMANNNIPFYIDSRSNNLDEYLNQKKKAQSQNKKRNLTFEKYNKEQSKDAIIAMLQKEIGVKDLQQRSTIGLLSCNELPSMLYEVIVKDIKGAELENKIAQKIREQYQSIRDFTLDSPQKDNIPTTLIKTINTDSSVTFENQPIDIPRLKNALQKELTLTQEKLLNVKEHEIEVDNYNRNKNTYKFKNQPKNKVDDKKLQRKYVFYRNEIRQEANWLASDLIHFMKNKSLWKGYMHNELQSFLAFFEDKKNDCIALLETVFNLKEDCILTKGLKNLFLKHGNFIDFYKEYLKLKEDFLSTESTFLENGFIGLPPKILKKELSKRLKYIFIVFQKRQFIIKELEEKKNNLYADAINLSRGIFDEKPTMIPFKKPNPDEFASWFVASYQYNNYQSFYELTPDIVERDKKKKYKNLRAINKVKIQDYYLKLMVDTLYQDLFNQPLDKSLSDFYVSKAEREKIKADAKAYQKLNDSSLWNKVIHLSLQNNRITANPKLKDIGKYKRALQDEKIATLLTYDARTWTYALQKPEKENENDYKELHYTALNMELQEYEKVRSKELLKQVQELEKKILDKFYDFSNNASHPEDLEIEDKKGKRHPNFKLYITKALLKNESEIINLENIDIEILLKYYDYNTEELKEKIKNMDEDEKAKIINTKENYNKITNVLIKKALVLIIIRNKMAHNQYPPKFIYDLANRFVPKKEEEYFATYFNRVFETITKELWENKEKKDKTQV

SEQ ID NO: 124 - protein, 1119 aa, Porphyromonas gingivalis; identical to SEQ ID NO: 50

SEQ ID NO: 125 - protein, 1175 aa, Porphyromonas species
MTEQSERPYNGTYYTLEDKHFWAAFLNLARHNAYITLTHIDRQLAYSKADITNDQDVLSFKALWKNFDNDLERKSRLRSLILKHFSFLEGAAYGKKLFESKSSGNKSSKNKELTKKEKEELQANALSLDNLKSILFDFLQKLKDFRNYYSHYRHSESSELPLFDGNMLQRLYNVFDVSVQRVKRDHEHNDKVDPHRHFNHLVRKGKKDRYGHNDNPSFKHHFVDSEGMVTEAGLLFFVSLFLEKRDAIWMQKKIRGFKGGTETYQQMTNEVFCRSRISLPKLKLESLRTDDWMLLDMLNELVRCPKPLYDRLREDDRACFRVPVDILPDEDDTDGGGEDPFKNTLVRHQDRFPYFALRYFDLKKVFTSLRFHIDLGTYHFAIYKKMIGEQPEDRHLTRNLYGFGRIQDFAEEHRPEEWKRLVRDLDYFETGDKPYISQTTPHYHIEKGKIGLRFVPEGQHLWPSPEVGTTRTGRSKYAQDKRLTAEAFLSVHELMPMMFYYFLLREKYSEEVSAEKVQGRIKRVIEDVYAIYDAFARDEINTLKELDACLADKGIRRGHLPKQMIGILSQERKDMEEKVRKKLQEMIADTDHRLDMLDRQTDRKIRIGRKNAGLPKSGVIADWLVRDMMRFQPVAKDTSGKPLNNSKANSTEYRMLQRALALFGGEKERLTPYFRQMNLTGGNNPHPFLHETRWESHTNILSFYRSYLRARKAFLERIGRSDRVENCPFLLLKEPKTDRQTLVAGWKGEFHLPRGIFTEAVRDCLIEMGYDEVGSYREVGFMAKAVPLYFERACEDRVQPFYDSPFNVGNSLKPKKGRFLSKEDRAEEWERGKERFRDLEAWSHSAARRIKDAFAGIEYASPGNKKKIEQLLRDLSLWEAFESKLKVRADKINLAKLKKEILEAQEHPYHDFKSWQKFERELRLVKNQDIITWMMCRDLMEENKVEGLDTGTLYLKDIRPNVQEQGSLNVLNRVKPMRLPVVVYRADSRGHVHKEEAPLATVYIEERDTKLLKQGNFKSFVKDRRLNGLFSFVDTGGLAMEQYPISKLRVEYELAKYQTARVCVFELTLRLEESLLSRYPHLPDESFREMLESWSDPLLAKWPELHGKVRLLIAVRNAFSHNQYPMYDEAVFSSIRKYDPSSPDAIEERMGLNIAHRLSEEVKQAKETVERIIQA

SEQ ID NO: 126 - protein, 1132 aa, Prevotella intermedia; identical to SEQ ID NO: 53

SEQ ID NO: 127 - protein, 1134 aa, Prevotella intermedia
MKMEDDKKTKESTNMLDNKHFWAAFLNLARHNVYITVNHINKVLELKNKKDQDIIIDNDQDILAIKTHWEKVNGDLNKTERLRELMTKHFPFLETAIYTKNKEDKEEVKQEKQAKAQSFDSLKHCLFLFLEKLQEARNYYSHYKYSESTKEPMLEKELLKKMYNIFDDNIQLVIKDYQHNKDINPDEDFKHLDRTEEEFNYYFTTNKKGNITASGLLFFVSLFLEKKDAIWMQQKLRGFKDNRESKKKMTHEVFCRSRMLLPKLRLESTQTQDWILLDMLNELIRCPKSLYERLQGEYRKKFNVPFDSADEDYDAEQEPFKNTLVRHQDRFPYFALRYFDYNEIFTNLRFQIDLGTYHFSIYKKLIGGQKEDRHLTHKLYGFERIQEFAKQNRTDEWKAIVKDFDTYETSEEPYISETAPHYHLENQKIGIRFRNDNDEIWPSLKTNGENNEKRKYKLDKQYQAEAFLSVHELLPMMFYYLLLKKEEPNNDKKNASIVEGFIKREIRDIYKLYDAFANGEINNIDDLEKYCEDKGIPKRHLPKQMVAILYDEHKDMAEEAKRKQKEMVKDTKKLLATLEKQTQGEIEDGGRNIRLLKSGEIARWLVNDMMRFQPVQKDNEGNPLNNSKANSTEYQMLQRSLALYNKEEKPTRYFRQVNLINSSNPHPFLKWTKWEECNNILSFYRSYLTKKIEFLNKLKPEDWEKNQYFLKLKEPKTNRETLVQGWKNGFNLPRGIFTEPIREWFKRHQNDSEEYEKVETLDRVGLVTKVIPLFFKKEDSKDKEEYLKKDAQKEINNCVQPFYGFPYNVGNIHKPDEKDFLPSEERKKLWGDKKYKFKGYKAKVKSKKLTDKEKEEYRSYLEFQSWNKFERELRLVRNQDIVTWLLCTELIDKLKVEGLNVEELKKLRLKDIDTDTAKQEKNNILNRVMPMQLPVTVYEIDDSHNIVKDRPLHTVYIEETKTKLLKQGNFKALVKDRRLNGLFSFVDTSSETELKSNPISKSLVEYELGEYQNARIETIKDMLLLEETLIEKYKTLPTDNFSDMLNGWLEGKDEADKARFQNDVKLLVAVRNAFSHNQYPMRNRIAFANINPFSLSSADTSEEKKLDIANQLKDKTHKIIKRIIEIEKPIETKE

SEQ ID NO: 128 - protein, 1133 aa, Prevotella intermedia
MEDDKKTTDSISYELKDKHFWAAFLNLARHNVYITVNHINKVLELKNKKDQDIIIDNDQDILAIKTHWEKVNGDLNKTERLRELMTKHFPFLETAIYSKNKEDKEEVKQEKQAKAQSFDSLKHCLFLFLEKLQETRNYYSHYKYSESTKEPMLEKELLKKMYNIFDDNIQLVIKDYQHNKDINPDEDFKHLDRTEEDFNYYFTRNKKGNITESGLLFFVSLFLEKKDAIWMQQKLRGFKDNRESKKKMTHEVFCRSRMLLPKLRLESTQTQDWILLDMLNELIRCPKSLYERLQGEDREKFKVPFDPADEDYDAEQEPFKNTLVRHQDRFPYFALRYFDYNEIFTNLRFQIDLGTFHFSIYKKLIGGQKEDRHLTHKLYGFERIQEFAKQNRPDEWKAIVKDLDTYETSNERYISETTPHYHLENQKIGIRFRNDNDEIWPSLKTNGENNEKSKYKLDKQYQAEAFLSVHELLPMMFYYLLLKKEEPNNDKKNASIVEGFIKREIRDMYKLYDAFANGEINNIDDLEKYCEDKGIPKRHLPKQMVAILYDEHKDMVKEAKRKQRKMVKDTEKLLAALEKQTQEKTEDGGRNIRLLKSGEIARWLVNDMMRFQPVQKDNEGNPLNNSKANSTEYQMLQRSLALYNKEEKPTRYFRQVNLINSSNPHPFLKWTKWEECNNILSFYRSYLTKKIEFLNKLKPEDWEKNQYFLKLKEPKTNRETLVQGWKNGFNLPRGIFTEPIREWFKRHQNDSKEYEKVEALDRVGLVTKVIPLFFKKEDSKDKEEDLKKDAQKEINNCVQPFYSFPYNVGNIHKPDEKDFLHREERIELWDKKKDKFKGYKAKVKSKKLTDKEKEEYRSYLEFQSWNKFERELRLVRNQDIVTWLLCTELIDKLKVEGLNVEELKKLRLKDIDTDTAKQEKNNILNRVMPMQLPVTVYEIDDSHNIVKDRPLHTVYIEETKTKLLKQGNFKALVKDRRLNGLFSFVDTSSEAELKSNPISKSLVEYELGEYQNARIETIKDMLLLEETLIEKYKNLPTDNFSDMLNGWLEGKDEADKARFQNDVKLLVAVRNAFSHNQYPMRNRIAFANINPFSLSSADTSEEKKLDIANQLKDKTHKIIKRIIEIEKPIETKE

SEQ ID NO: 129 - protein, 1127 aa, Prevotella buccae; identical to SEQ ID NO: 51

SEQ ID NO: 130 - protein, 1125 aa, Prevotella pallens
MKEEEKGKTPVVSTYNKDDKHFWAAFLNLARHNVYITVNHINKILGEGEINRDGYENTLEKSWNEIKDINKKDRLSKLIIKHFPFLEVTTYQRNSADTTKQKEEKQAEAQSLESLKKSFFVFIYKLRDLRNHYSHYKHSKSLERPKFEEDLQEKMYNIFDASIQLVKEDYKHNTDIKTEEDFKHLDRKGQFKYSFADNEGNITESGLLFFVSLFLEKKDAIWVQKKLEGFKCSNESYQKMTNEVFCRSRMLLPKLRLQSTQTQDWILLDMLNELIRCPKSLYERLREEDRKKFRVPIEIADEDYDAEQEPFKNALVRHQDRFPYFALRYFDYNEIFTNLRFQIDLGTYHFSIYKKQIGDYKESHHLTHKLYGFERIQEFTKQNRPDEWRKFVKTFNSFETSKEPYIPETTPHYHLENQKIGIRFRNDNDKIWPSLKTNSEKNEKSKYKLDKSFQAEAFLSVHELLPMMFYYLLLKTENTDNDNEIETKKKENKNDKQEKHKIEEIIENKITEIYALYDAFANGKINSIDKLEEYCKGKDIEIGHLPKQMIAILKSEHKDMATEAKRKQEEMLADVQKSLESLDNQINEEIENVERKNSSLKSGEIASWLVNDMMRFQPVQKDNEGNPLNNSKANSTEYQMLQRSLALYNKEEKPTRYFRQVNLIESSNPHPFLNNTEWEKCNNILSFYRSYLEAKKNFLESLKPEDWEKNQYFLMLKEPKTNCETLVQGWKNGFNLPRGIFTEPIRKWFMEHRKNITVAELKRVGLVAKVIPLFFSEEYKDSVQPFYNYLFNVGNINKPDEKNFLNCEERRELLRKKKDEFKKMTDKEKEENPSYLEFQSWNKFERELRLVRNQDIVTWLLCMELFNKKKIKELNVEKIYLKNINTNTTKKEKNTEEKNGEEKIIKEKNNILNRIMPMRLPIKVYGRENFSKNKKKKIRRNTFFTVYIEEKGTKLLKQGNFKALERDRRLGGLFSFVKTHSKAESKSNTISKSRVEYELGEYQKARIEIIKDMLALEETLIDKYNSLDTDNFHNMLTGWLKLKDEPDKASFQNDVDLLIAVRNAFSHNQYPMRNRIAFANINPFSLSSANTSEEKGLGIANQLKDKTHKTIEKIIEIEKPIETKE

SEQ ID NO: 131 - protein, 1157 aa, Myroides odoratimimus
MKDILTTDTTEKQNRFYSHKIADKYFFGGYFNLASNNIYEVFEEVNKRNTFGKLAKRDNGNLKNYIIHVFKDELSISDFEKRVAIFASYFPILETVDKKSIKERNRTIDLTLSQRIRQFREMLISLVTAVDQLRNFYTHYHHSEIVIENKVLDFLNSSLVSTALHVKDKYLKTDKTKEFLKETIAAELDILIEAYKKKQIEKKNTRFKANKREDILNAIYNEAFWSFINDKDKDKETVVAKGADAYFEKNHHKSNDPDFALNISEKGIVYLLSFFLTNKEMDSLKANLTGFKGKVDRESGNSIKYMATQRIYSFHTYRGLKQKIRTSEEGVKETLLMQMIDELSKVPNVVYQHLSTTQQNSFIEDWNEYYKDYEDDVETDDLSRVIHPVIRKRYEDRFNYFAIRFLDEFFDFPTLRFQVHLGDYVHDRRTKQLGKVESDRIIKEKVTVFARLKDINSAKANYFHSLEEQDKEELDNKWTLFPNPSYDFPKEHTLQHQGEQKNAGKIGIYVKLRDTQYKEKAALEEARKSLNPKERSATKASKYDIITQIIEANDNVKSEKPLVFTGQPIAYLSMNDIHSMLFSLLTDNAELKKTPEEVEAKLIDQIGKQINEILSKDTDTKILKKYKDNDLKETDTDKITRDLARDKEEIEKLILEQKQRADDYNYTSSTKFNIDKSRKRKHLLFNAEKGKIGVWLANDIKRFMTEEFKSKWKGYQHTELQKLFAYYDTSKSDLDLILSDMVMVKDYPIELIALVKKSRTLVDFLNKYLEARLGYMENVITRVKNSIGTPQFKTVRKECFTFLKKSNYTVVSLDKQVERILSMPLFIERGFMDDKPTMLEGKSYQQHKEKFADWFVHYKENSNYQNFYDTEVYEITTEDKREKAKVTKKIKQQQKNDVFTLMMVNYMLEEVLKLSSNDRLSLNELYQTKEERIVNKQVAKDTQERNKNYIWNKVVDLQLCEGLVRIDKVKLKDIGNFRKYENDSRVKEFLTYQSDIVWSAYLSNEVDSNKLYVIERQLDNYESIRSKELLKEVQEIECSVYNQVANKESLKQSGNENFKQYVLQGLVPIGMDVREMLILSTDVKFIKEEIIQLGQAGEVEQDLYSLIYIRNKFAHNQLPIKEFFDFCENNYRSISDNEYYAEYYMEIFRSIKEKYTS

SEQ ID NO: 132 - protein, 1157 aa, Myroides odoratimimus
MKDILTTDTTEKQNRFYSHKIADKYFFGGYFNLASNNIYEVFEEVNKRNTFGKLAKRDNGNLKNYIIHVFKDELSISDFEKRVAIFASYFPILETVDKKSIKERNRTIDLTLSQRIRQFREMLISLVTAVDQLRNFYTHYHHSEIVIENKVLDFLNSSLVSTALHVKDKYLKTDKTKEFLKETIAAELDILIEAYKKKQIEKKNTRFKANKREDILNAIYNEAFWSFINDKDKDKETVVAKGADAYFEKNHHKSNDPDFALNISEKGIVYLLSFFLTNKEMDSLKANLTGFKGKVDRESGNSIKYMATQRIYSFHTYRGLKQKIRTSEEGVKETLLMQMIDELSKVPNVVYQHLSTTQQNSFIEDWNEYYKDYEDDVETDDLSRVIHPVIRKRYEDRFNYFAIRFLDEFFDFPTLRFQVHLGDYVHDRRTKQLGKVESDRIIKEKVTVFARLKDINSAKASYFHSLEEQDKEELDNKWTLFPNPSYDFPKEHTLQHQGEQKNAGKIGIYVKLRDTQYKEKAALEEARKSLNPKERSATKASKYDIITQIIEANDNVKSEKPLVFTGQPIAYLSMNDIHSMLFSLLTDNAELKKTPEEVEAKLIDQIGKQINEILSKDTDTKILKKYKDNDLKETDTDKITRDLARDKEEIEKLILEQKQRADDYNYTSSTKFNIDKSRKRKHLLFNAEKGKIGVWLANDIKRFMFKESKSKWKGYQHTELQKLFAYFDTSKSDLELILSDMVMVKDYPIELIDLVRKSRTLVDFLNKYLEARLGYIENVITRVKNSIGTPQFKTVRKECFAFLKESNYTVASLDKQIERILSMPLFIERGFMDSKPTMLEGKSYQQHKEDFADWFVHYKENSNYQNFYDTEVYEIITEDKREQAKVTKKIKQQQKNDVFTLMMVNYMLEEVLKLPSNDRLSLNELYQTKEERIVNKQVAKDTQERNKNYIWNKVVDLQLCEGLVRIDKVKLKDIGNFRKYENDSRVKEFLTYQSDIVWSGYLSNEVDSNKLYVIERQLDNYESIRSKELLKEVQEIECIVYNQVANKESLKQSGNENFKQYVLQGLLPRGTDVREMLILSTDVKFKKEEIMQLGQVREVEQDLYSLIYIRNKFAHNQLPIKEFFDFCENNYRPISDNEYYAEYYMEIFRSIKEKYAS

SEQ ID NO: 133 - protein, 1224 aa, Bergeyella zoohelcum; identical to SEQ ID NO: 58

SEQ ID NO: 134 - protein, 1150 aa, Prevotella saccharolytica
MMEKENVQGSHIYYEPTDKCFWAAFYNLARHNAYLTIAHINSFVNSKKGINNDDKVLDIIDDWSKFDNDLLMGARLNKLILKHFPFLKAPLYQLAKRKTRKQQGKEQQDYEKKGDEDPEVIQEAIANAFKMANVRKTLHAFLKQLEDLRNHFSHYNYNSPAKKMEVKFDDGFCNKLYYVFDAALQMVKDDNRMNPEINMQTDFEHLVRLGRNRKIPNTFKYNFTNSDGTINNNGLLFFVSLFLEKRDAIWMQKKIKGFKGGTENYMRMTNEVFCRNRMVIPKLRLETDYDNHQLMFDMLNELVRCPLSLYKRLKQEDQDKFRVPIEFLDEDNEADNPYQENANSDENPTEETDPLKNTLVRHQHRFPYFVLRYFDLNEVFKQLRFQINLGCYHFSIYDKTIGERTEKRHLTRTLFGFDRLQNFSVKLQPEHWKNMVKHLDTEESSDKPYLSDAMPHYQIENEKIGIHFLKTDTEKKETVWPSLEVEEVSSNRNKYKSEKNLTADAFLSTHELLPMMFYYQLLSSEEKTRAAAGDKVQGVLQSYRKKIFDIYDDFANGTINSMQKLDERLAKDNLLRGNMPQQMLAILEHQEPDMEQKAKEKLDRLITETKKRIGKLEDQFKQKVRIGKRRADLPKVGSIADWLVNDMMRFQPAKRNADNTGVPDSKANSTEYRLLQEALAFYSAYKDRLEPYFRQVNLIGGTNPHPFLHRVDWKKCNHLLSFYHDYLEAKEQYLSHLSPADWQKHQHFLLLKVRKDIQNEKKDWKKSLVAGWKNGFNLPRGLFTESIKTWFSTDADKVQITDTKLFENRVGLIAKLIPLYYDKVYNDKPQPFYQYPFNINDRYKPEDTRKRFTAASSKLWNEKKMLYKNAQPDSSDKIEYPQYLDFLSWKKLERELRMLRNQDMMVWLMCKDLFAQCTVEGVEFADLKLSQLEVDVNVQDNLNVLNNVSSMILPLSVYPSDAQGNVLRNSKPLHTVYVQENNTKLLKQGNFKSLLKDRRLNGLFSFIAAEGEDLQQHPLTKNRLEYELSIYQTMRISVFEQTLQLEKAILTRNKTLCGNNFNNLLNSWSEHRTDKKTLQPDIDFLIAVRNAFSHNQYPMSTNTVMQGIEKFNIQTPKLEEKDGLGIASQLAKKTKDAASRLQNIINGGTN

SEQ ID NO: 135 - protein, 1175 aa, Porphyromonas gingivalis
MTEQNEKPYNGTYYTLEDKHFWAAFFNLARHNAYITLTHIDRQLAYSKADITNDEDILFFKGQWKNLDNDLERKARLRSLILKHFSFLEGAAYGKKLFESQSSGNKSSKKKELTKKEKEELQANALSLDNLKSILFDFLQKLKDFRNYYSHYRHPESSELPLFDGNMLQRLYNVFDVSVQRVKRDHEHNDKVDPHRHFNHLVRKGKKDRCGNNDNPFFKHHFVDREEKVTEAGLLFFVSLFLEKRDAIWMQKKIRGFKGGTETYQQMTNEVFCRSRISLPKLKLESLRTDDWMLLDMLNELVRCPKSLYDRLREEDRARFRVPVDILSDEDDTDGTEEDPFKNTLVRHQDRFPYFALRYFDLKKVFTSLRFHIDLGTYHFAIYKKNIGEQPEDRHLTRNLYGFGRIQDFAEEHRPEEWKRLVRDLDYFETGDKPYITQTTPHYHIEKGKIGLRFVPEGQLLWPSPEVGATRTGRSKYAQDKRFTAEAFLSVHELMPMMFYYFLLREKYSEEASAERVQGRIKRVIEDVYAVYDAFARGEIDTLDRLDACLADKGIRRGHLPRQMIAILSQEHKDMEEKVRKKLQEMIADTDHRLDMLDRQTDRKIRIGRKNAGLPKSGVIADWLVRDMMRFQPVAKDTSGKPLNNSKANSTEYRMLQRALALFGGEKERLTPYFRQMNLTGGNNPHPFLHETRWESHTNILSFYRSYLKARKAFLQSIGRSDRVENHRFLLLKEPKTDRQTLVAGWKGEFHLPRGIFTEAVRDCLIEMGLDEVGSYKEVGFMAKAVPLYFERACKDRVQPFYDYPFNVGNSLKPKKGRFLSKEKRAEEWESGKERFRDLEAWSHSAARRIEDAFAGIENASRENKKKIEQLLQDLSLWETFESKLKVKADKINIAKLKKEILEAKEHPYLDFKSWQKFERELRLVKNQDIITWMMCRDLMEENKVEGLDTGTLYLKDIRTDVHEQGSLNVLNRVKPMRLPVVVYRADSRGHVHKEQAPLATVYIEERDTKLLKQGNFKSFVKDRRLNGLFSFVDTGALAMEQYPISKLRVEYELAKYQTARVCAFEQTLELEESLLTRYPHLPDKNFRKMLESWSDPLLDKWPDLHGNVRLLIAVRNAFSHNQYPMYDETLFSSIRKYDPSSPDAIEERMGLNIAHRLSEEVKQAKEMVERIIQA

SEQ ID NO: 136 - protein, 1115 aa, Bacteroides pyogenes
MESIKNSQKSTGKTLQKDPPYFGLYLNMALLNVRKVENHIRKWLGDVALLPEKSGFHSLLTTDNLSSAKWTRFYYKSRKFLPFLEMFDSDKKSYENRRETTECLDTIDRQKISSLLKEVYGKLQDIRNAFSHYHIDDQSVKHTALIISSEMHRFIENAYSFALQKTRARFTGVFVETDFLQAEEKGDNKKFFAIGGNEGIKLKDNALIFLICLFLDREEAFKFLSRATGFKSTKEKGFLAVRETFCALCCRQPHERLLSVNPREALLMDMLNELNRCPDILFEMLDEKDQKSFLPLLGEEEQAHILENSLNDELCEAIDDPFEMIASLSKRVRYKNRFPYLMLRYIEEKNLLPFIRFRIDLGCLELASYPKKMGEENNYERSVTDHAMAFGRLTDFHNEDAVLQQITKGITDEVRFSLYAPRYAIYNNKIGFVRTGGSDKISFPTLKKKGGEGHCVAYTLQNTKSFGFISIYDLRKILLLSFLDKDKAKNIVSGLLEQCEKHWKDLSENLFDAIRTELQKEFPVPLIRYTLPRSKGGKLVSSKLADKQEKYESEFERRKEKLTEILSEKDFDLSQIPRRMIDEWLNVLPTSREKKLKGYVETLKLDCRERLRVFEKREKGEHPVPPRIGEMATDLAKDIIRMVIDQGVKQRITSAYYSEIQRCLAQYAGDDNRRHLDSIIRELRLKDTKNGHPFLGKVLRPGLGHTEKLYQRYFEEKKEWLEATFYPAASPKRVPRFVNPPTGKQKELPLIIRNLMKERPEWRDWKQRKNSHPIDLPSQLFENEICRLLKDKIGKEPSGKLKWNEMFKLYWDKEFPNGMQRFYRCKRRVEVFDKVVEYEYSEEGGNYKKYYEALIDEVVRQKISSSKEKSKLQVEDLTLSVRRVFKRAINEKEYQLRLLCEDDRLLFMAVRDLYDWKEAQLDLDKIDNMLGEPVSVSQVIQLEGGQPDAVIKAECKLKDVSKLMRYCYDGRVKGLMPYFANHEATQEQVEMELRHYEDHRRRVFNWVFALEKSVLKNEKLRRFYEESQGGCEHRRCIDALRKASLVSEEEYEFLVHIRNKSAHNQFPDLEIGKLPPNVTSGFCECIWSKYKAIICRIIPFIDPERRFFGKLLEQK

SEQ ID NO: 137 - protein, 1135 aa, Porphyromonas gingivalis
MNTVPASENKGQSRTVEDDPQYFGLYLNLARENLIEVESHVRIKFGKKKLNEESLKQSLLCDHLLSVDRWTKVYGHSRRYLPFLHYFDPDSQIEKDHDSKTGVDPDSAQRLIRELYSLLDFLRNDFSHNRLDGTTFEHLEVSPDISSFITGTYSLACGRAQSRFADFFKPDDFVLAKNRKEQLISVADGKECLTVSGLAFFICLFLDREQASGMLSRIRGFKRTDENWARAVHETFCDLCIRHPHDRLESSNTKEALLLDMLNELNRCPRILYDMLPEEERAQFLPALDENSMNNLSENSLNEESRLLWDGSSDWAEALTKRIRHQDRFPYLMLRFIEEMDLLKGIRFRVDLGEIELDSYSKKVGRNGEYDRTITDHALAFGKLSDFQNEEEVSRMISGEASYPVRFSLFAPRYAIYDNKIGYCHTSDPVYPKSKTGEKRALSNPRSMGFISVHDLRKLLLMELLCEGSFSRMQSDFLRKANRILDETAEGKLQFSALFPEMRHRFIPPQNPKSKDRREKAETTLEKYKQEIKGRKDKLNSQLLSAFDMDQRQLPSRLLDEWMNIRPASHSVKLRTYVKQLNEDCRLRLQKFRKDGDGKARAIPLVGEMATFLSQDIVRMIISEETKKLITSAYYNEMQRSLAQYAGEENRHQFRAIVAELRLLDPSSGHPFLSATMETAHRYTEDFYKCYLEKKREWLAKTFYRPEQDENTKRRISVFFVPDGEARKLLPLLIRRRMKEQNDLQDWIRNKQAHPIDLPSHLFDSKIMELLKVKDGKKKWNEAFKDWWSTKYPDGMQPFYGLRRELNIHGKSVSYIPSDGKKFADCYTHLMEKTVQDKKRELRTAGKPVPPDLAADIKRSFHRAVNEREFMLRLVQEDDRLMLMAINKMMTDREEDILPGLKNIDSILDEENQFSLAVHAKVLEKEGEGGDNSLSLVPATIEIKSKRKDWSKYIRYRYDRRVPGLMSHFPEHKATLDEVKTLLGEYDRCRIKIFDWAFALEGAIMSDRDLKPYLHESSSREGKSGEHSTLVKMLVEKKGCLTPDESQYLILIRNKAAHNQFPCAAEMPLIYRDVSAKVGSIEGSSAKDLPEGSSLVDSLWKKYEMIIRKILPILDPENRFFGKLLNNMSQPINDL

SEQ ID NO: 138 - protein, 1135 aa, Porphyromonas gingivalis
MNTVPASENKGQSRTVEDDPQYFGLYLNLARENLIEVESHVRIKFGKKKLNEESLKQSLLCDHLLSVDRWTKVYGHSRRYLPFLHYFDPDSQIEKDHDSKTGVDPDSAQRLIRELYSLLDFLRNDFSHNRLDGTTFEHLEVSPDISSFITGTYSLACGRAQSRFADFFKPDDFVLAKNRKEQLISVADGKECLTVSGLAFFICLFLDREQASGMLSRIRGFKRTDENWARAVHETFCDLCIRHPHDRLESSNTKEALLLDMLNELNRCPRILYDMLPEEERAQFLPALDENSMNNLSENSLNEESRLLWDGSSDWAEALTKRIRHQDRFPYLMLRFIEEMDLLKGIRFRVDLGEIELDSYSKKVGRNGEYDRTITDHALAFGKLSDFQNEEEVSRMISGEASYPVRFSLFAPRYAIYDNKIGYCHTSDPVYPKSKTGEKRALSNPQSMGFISVHDLRKLLLMELLCEGSFSRMQSGFLRKANRILDETAEGKLQFSALFPEMRHRFIPPQNPKSKDRREKAETTLEKYKQEIKGRKDKLNSQLLSAFDMNQRQLPSRLLDEWMNIRPASHSVKLRTYVKQLNEDCRLRLRKFRKDGDGKARAIPLVGEMATFLSQDIVRMIISEETKKLITSAYYNEMQRSLAQYAGEENRRQFRAIVAELHLLDPSSGHPFLSATMETAHRYTEDFYKCYLEKKREWLAKTFYRPEQDENTKRRISVFFVPDGEARKLLPLLIRRRMKEQNDLQDWIRNKQAHPIDLPSHLFDSKIMELLKVKDGKKKWNEAFKDWWSTKYPDGMQPFYGLRRELNIHGKSVSYIPSDGKKFADCYTHLMEKTVQDKKRELRTAGKPVPPDLAADIKRSFHRAVNEREFMLRLVQEDDRLMLMAINKMMTDREEDILPGLKNIDSILDEENQFSLAVHAKVLEKEGEGGDNSLSLVPATIEIKSKRKDWSKYIRYRYDRRVPGLMSHFPEHKATLDEVKTLLGEYDRCRIKIFDWAFALEGAIMSDRDLKPYLHESSSREGKSGEHSTLVKMLVEKKGCLTPDESQYLILIRNKAAHNQFPCAAEMPLIYRDVSAKVGSIEGSSAKDLPEGSSLVDSLWKKYEMIIRKILPILDHENRFFGKLLNNMSQPINDL

SEQ ID NO: 139 - protein, 1135 aa, Porphyromonas gingivalis
MNTVPASENKGQSRTVEDDPQYFGLYLNLARENLIEVESHVRIKFGKKKLNEESLKQSLLCDHLLSVDRWTKVYGHSRRYLPFLHYFDPDSQIEKDHDSKTGVDPDSAQRLIRELYSLLDFLRNDFSHNRLDGTTFEHLEVSPDISSFITGTYSLACGRAQSRFADFFKPDDFVLAKNRKEQLISVADGKECLTVSGLAFFICLFLDREQASGMLSRIRGFKRTDENWARAVHETFCDLCIRHPHDRLESSNTKEALLLDMLNELNRCPRILYDMLPEEERAQFLPALDENSMNNLSENSLNEESRLLWDGSSDWAEALTKRIRHQDRFPYLMLRFIEEMDLLKGIRFRVDLGEIELDSYSKKVGRNGEYDRTITDHALAFGKLSDFQNEEEVSRMISGEASYPVRFSLFAPRYAIYDNKIGYCHTSDPVYPKSKTGEKRALSNPRSMGFISVHDLRKLLLMELLCEGSFSRMQSDFLRKANRILDETAEGKLQFSALFPEMRHRFIPPQNPKSKDRREKAETTLEKYKQEIKGRKDKLNSQLLSAFDMDQRQLPSRLLDEWMNIRPASHSVKLRTYVKQLNEDCRLRLQKFRKDGDGKARAIPLVGEMATFLSQDIVRMIISEETKKLITSAYYNEMQRSLAQYAGEENRHQFRAIVAELRLLDPSSGHPFLSATMETAHRYTEDFYKCYLEKKREWLAKTFYRPEQDENTKRRISVFFVPDGEARKLLPLLIRRRMKEQNDLQDWIRNKQAHPIDLPSHLFDSKVMELLKVKDGKKKWNEAFKDWWSTKYPDGMQPFYGLRRELNIHGKSVSYIPSDGKKFADCYTHLMEKTVRDKKRELRTAGKPVPPDLAAYIKRSFHRAVNEREFMLRLVQEDDRLMLMAINKIMTDREEDILPGLKNIDSILDKENQFSLAVHAKVLEKEGEGGDNSLSLVPATIEIKSKRKDWSKYIRYRYDRRVPGLMSHFPEHKATLDEVKTLLGEYDRCRIKIFDWAFALEGAIMSDRDLKPYLHESSSREGKSGEHSTLVKMLVEKKGCLTPDESQYLILIRNKAAHNQFPCAAEIPLIYRDVSAKVGSIEGSSAKDLPEGSSLVDSLWKKYEMIIRKILPILDPENRFFGKLLNNMSQPINDL

SEQ ID NO: 140 - protein, 1125 aa, Prevotella intermedia
MKMEDDKKTTESTNMLDNKHFWAAFLNLARHNVYITVNHINKVLELKNKKDQDIIIDNDQDILAIKTHWEKVNGDLNKTERLRELMTKHFPFLETAIYTKNKEDKEEVKQEKQAEAQSLESLKDCLFLFLEKLQEARNYYSHYKYSESTKEPMLEEGLLEKMYNIFDDNIQLVIKDYQHNKDINPDEDFKHLDRKGQFKYSFADNEGNITESGLLFFVSLFLEKKDAIWMQQKLTGFKDNRESKKKMTHEVFCRRRMLLPKLRLESTQTQDWILLDMLNELIRCPKSLYERLQGEYRKKFNVPFDSADEDYDAEQEPFKNTLVRHQDRFPYFALRYFDYNEIFTNLRFQIDLGTYHFSIYKKLIGGQKEDRHLTHKLYGFERIQEFAKQNRPDEWKALVKDLDTYETSNERYISETTPHYHLENQKIGIRFRNGNKEIWPSLKTNGENNEKSKYKLDKPYQAEAFLSVHELLPMMFYYLLLKKEEPNNDKKNASIVEGFIKREIRDMYKLYDAFANGEINNIGDLEKYCEDKGIPKRHLPKQMVAILYDEPKDMVKEAKRKQKEMVKDTKKLLATLEKQTQEEIEDGGRNIRLLKSGEIARWLVNDMMRFQPVQKDNEGNPLNNSKANSTEYQMLQRSLALYNKEEKPTRYFRQVNLINSSNPHPFLKWTKWEECNNILSFYRNYLTKKIEFLNKLKPEDWEKNQYFLKLKEPKTNRETLVQGWKNGFNLPRGIFTEPIREWFKRHQNDSKEYEKVEALKRVGLVTKVIPLFFKEEYFKEDAQKEINNCVQPFYSFPYNVGNIHKPDEKDFLPSEERKKLWGDKKDKFKGYKAKVKSKKLTDKEKEEYRSYLEFQSWNKFERELRLVRNQDIVTWLLCTELIDKMKVEGLNVEELQKLRLKDIDTDTAKQEKNNILNRIMPMQLPVTVYEIDDSHNIVKDRPLHTVYIEETKTKLLKQGNFKALVKDRRLNGLFSFVDTSSKAELKDKPISKSVVEYELGEYQNARIETIKDMLLLEKTLIKKYEKLPTDNFSDMLNGWLEGKDESDKARFQNDVKLLVAVRNAFSHNQYPMRNRIAFANINPFSLSSADISEEKKLDIANQLKDKTHKIIKKIIEIEKPIETKE

SEQ ID NO: 141 - protein, 1161 aa, Bacteroidetes bacterium
MENQTQKGKGIYYYYTKNEDKHYFGSFLNLANNNIEQIIEEFRIRLSLKDEKNIKEIINNYFTDKKSYTDWERGINILKEYLPVIDYLDLAITDKEFEKIDLKQKETAKRKYFRTNFSLLIDTIIDLRNFYTHYFHKPISINPDVAKFLDKNLLNVCLDIKKQKMKTDKTKQALKDGLDKELKKLIELKKAELKEKKIKTWNITENVEGAVYNDAFNHMVYKNNAGVTILKDYHKSILPDDKIDSELKLNFSISGLVFLLSMFLSKKEIEQFKSNLEGFKGKVIGENGEYEISKFNNSLKYMATHWIFSYLTFKGLKQRVKNTFDKETLLMQMIDELNKVPHEVYQTLSKEQQNEFLEDINEYVQDNEENKKSMENSIVVHPVIRKRYDDKFNYFAIRFLDEFANFPTLKFFVTAGNFVHDKREKQIQGSMLTSDRMIKEKINVFGKLTEIAKYKSDYFSNENTLETSEWELFPNPSYLLIQNNIPVHIDLIHNTEEAKQCQIAIDRIKCTTNPAKKRNTRKSKEEIIKIIYQKNKNIKYGDPTALLSSNELPALIYELLVNKKSGKELENIIVEKIVNQYKTIAGFEKGQNLSNSLITKKLKKSEPNEDKINAEKIILAINRELEITENKLNIIKNNRAEFRTGAKRKHIFYSKELGQEATWIAYDLKRFMPEASRKEWKGFHHSELQKFLAFYDRNKNDAKALLNMFWNFDNDQLIGNDLNSAFREFHFDKFYEKYLIKRDEILEGFKSFISNFKDEPKLLKKGIKDIYRVFDKRYYIIKSTNAQKEQLLSKPICLPRGIFDNKPTYIEGVKVESNSALFADWYQYTYSDKHEFQSFYDMPRDYKEQFEKFELNNIKSIQNKKNLNKSDKFIYFRYKQDLKIKQIKSQDLFIKLMVDELFNVVFKNNIELNLKKLYQTSDERFKNQLIADVQKNREKGDTSDNKMNENFIWNMTIPLSLCNGQIEEPKVKLKDIGKFRKLETDDKVIQLLEYDKSKVWKKLEIEDELENMPNSYERIRREKLLKGIQEFEHFLLEKEKFDGINHPKHFEQDLNPNFKTYVINGVLRKNSKLNYTEIDKLLDLEHISIKDIETSAKEIHLAYFLIHVRNKFGHNQLPKLEAFELMKKYYKKNNEETYAEYFHKVSSQIVNEFKNSLEKHS

SEQ ID NO: 142 - protein, 1165 aa, Chryseobacterium jejuense
MEKTQTGLGIYYDHTKLQDKYFFGGFFNLAQNNIDNVIKAFIIKFFPERKDKDINIAQFLDICFKDNDADSDFQKKNKFLRIHFPVIGFLTSDNDKAGFKKKFALLLKTISELRNFYTHYYHKSIEFPSELFELLDDIFVKTTSEIKKLKKKDDKTQQLLNKNLSEEYDIRYQQQIERLKELKAQGKRVSLTDETAIRNGVFNAAFNHLIYRDGENVKPSRLYQSSYSEPDPAENGISLSQNSILFLLSMFLERKETEDLKSRVKGFKAKIIKQGEEQISGLKFMATHWVFSYLCFKGIKQKLSTEFHEETLLIQIIDELSKVPDEVYSAFDSKTKEKFLEDINEYMKEGNADLSLEDSKVIHPVIRKRYENKFNYFAIRFLDEYLSSTSLKFQVHVGNYVHDRRVKHINGTGFQTERIVKDRIKVFGRLSNISNLKADYIKEQLELPNDSNGWEIFPNPSYIFIDNNVPIHVLADEATKKGIELFKDKRRKEQPEELQKRKGKISKYNIVSMIYKEAKGKDKLRIDEPLALLSLNEIPALLYQILEKGATPKDIELIIKNKLTERFEKIKNYDPETPAPASQISKRLRNNTTAKGQEALNAEKLSLLIEREIENTETKLSSIEEKRLKAKKEQRRNTPQRSIFSNSDLGRIAAWLADDIKRFMPAEQRKNWKGYQHSQLQQSLAYFEKRPQEAFLLLKEGWDTSDGSSYWNNWVMNSFLENNHFEKFYKNYLMKRVKYFSELAGNIKQHTHNTKFLRKFIKQQMPADLFPKRHYILKDLETEKNKVLSKPLVFSRGLFDNNPTFIKGVKVTENPELFAEWYSYGYKTEHVFQHFYGWERDYNELLDSELQKGNSFAKNSIYYNRESQLDLIKLKQDLKIKKIKIQDLFLKRIAEKLFENVFNYPTTLSLDEFYLTQEERAEKERIALAQSLREEGDNSPNIIKDDFIWSKTIAFRSKQIYEPAIKLKDIGKFNRFVLDDEESKASKLLSYDKNKIWNKEQLERELSIGENSYEVIRREKLFKEIQNLELQILSNWSWDGINHPREFEMEDQKNTRHPNFKMYLVNGILRKNINLYKEDEDFWLESLKENDFKTLPSEVLETKSEMVQLLFLVILIRNQFAHNQLPEIQFYNFIRKNYPEIQNNTVAELYLNLIKLAVQKLKDNS

SEQ ID NO: 143 - protein, 1156 aa, Chryseobacterium carnipullorum
MNTRVTGMGVSYDHTKKEDKHFFGGFLNLAQDNITAVIKAFCIKFDKNPMSSVQFAESCFTDKDSDTDFQNKVRYVRTHLPVIGYLNYGGDRNTFRQKLSTLLKAVDSLRNFYTHYYHSPLALSTELFELLDTVFASVAVEVKQHKMKDDKTRQLLSKSLAEELDIRYKQQLERLKELKEQGKNIDLRDEAGIRNGVLNAAFNHLIYKEGEIAKPTLSYSSFYYGADSAENGITISQSGLLFLLSMFLGKKEIEDLKSRIRGFKAKIVRDGEENISGLKFMATHWIFSYLSFKGMKQRLSTDFHEETLLIQIIDELSKVPDEVYHDFDTATREKFVEDINEYIREGNEDFSLGDSTIIHPVIRKRYENKFNYFAVRFLDEFIKFPSLRFQVHLGNFVHDRRIKDIHGTGFQTERVVKDRIKVFGKLSEISSLKTEYIEKELDLDSDTGWEIFPNPSYVFIDNNIPIYISTNKTFKNGSSEFIKLRRKEKPEEMKMRGEDKKEKRDIASMIGNAGSLNSKTPLAMLSLNEMPALLYEILVKKTTPEEIELIIKEKLDSHFENIKNYDPEKPLPASQISKRLRNNTTDKGKKVINPEKLIHLINKEIDATEAKFALLAKNRKELKEKFRGKPLRQTIFSNMELGREATWLADDIKRFMPDILRKNWKGYQHNQLQQSLAFFNSRPKEAFTILQDGWDFADGSSFWNGWIINSFVKNRSFEYFYEAYFEGRKEYFSSLAENIKQHTSNHRNLRRFIDQQMPKGLFENRHYLLENLETEKNKILSKPLVFPRGLFDTKPTFIKGIKVDEQPELFAEWYQYGYSTEHVFQNFYGWERDYNDLLESELEKDNDFSKNSIHYSRTSQLELIKLKQDLKIKKIKIQDLFLKLIAGHIFENIFKYPASFSLDELYLTQEERLNKEQEALIQSQRKEGDHSDNIIKDNFIGSKTVTYESKQISEPNVKLKDIGKFNRFLLDDKVKTLLSYNEDKVWNKNDLDLELSIGENSYEVIRREKLFKKIQNFELQTLTDWPWNGTDHPEEFGTTDNKGVNHPNFKMYVVNGILRKHTDWFKEGEDNWLENLNETHFKNLSFQELETKSKSIQTAFLIIMIRNQFAHNQLPAVQFFEFIQKKYPEIQGSTTSELYLNFINLAVVELLELLEK

SEQ ID NO: 144 - protein, 1036 aa, Chryseobacterium ureilyticum
METQILGNGISYDHTKTEDKHFFGGFLNTAQNNIDLLIKAYISKFESSPRKLNSVQFPDVCFKKNDSDADFQHKLQFIRKHLPVIQYLKYGGNREVLKEKFRLLLQAVDSLRNFYTHFYHKPIQLPNELLTLLDTIFGEIGNEVRQNKMKDDKTRHLLKKNLSEELDFRYQEQLERLRKLKSEGKKVDLRDTEAIRNGVLNAAFNHLIFKDAEDFKPTVSYSSYYYDSDTAENGISISQSGLLFLLSMFLGRREMEDLKSRVRGFKARIIKHEEQHVSGLKFMATHWVFSEFCFKGIKTRLNADYHEETLLIQLIDELSKVPDELYRSFDVATRERFIEDINEYIRDGKEDKSLIESKIVHPVIRKRYESKFNYFAIRFLDEFVNFPTLRFQVHAGNYVHDRRIKSIEGTGFKTERLVKDRIKVFGKLSTISSLKAEYLAKAVNITDDTGWELLPHPSYVFIDNNIPIHLTVDPSFKNGVKEYQEKRKLQKPEEMKNRQGGDKMHKPAISSKIGKSKDINPESPVALLSMNEIPALLYEILVKKASPEEVEAKIRQKLTAVFERIRDYDPKVPLPASQVSKRLRNNTDTLSYNKEKLVELANKEVEQTERKLALITKNRRECREKVKGKFKRQKVFKNAELGTEATWLANDIKRFMPEEQKKNWKGYQHSQLQQSLAFFESRPGEARSLLQAGWDFSDGSSFWNGWVMNSFARDNTFDGFYESYLNGRMKYFLRLADNIAQQSSTNKLISNFIKQQMPKGLFDRRLYMLEDLATEKNKILSKPLIFPRGIFDDKPTFKKGVQVSEEPEAFADWYSYGYDVKHKFQEFYAWDRDYEELLREELEKDTAFTKNSIHYSRESQIELLAKKQDLKVKKVRIQDLYLKLMAEFLFENVFGHELALPLDQFYLTQEERLKQEQEAIVQSQRPKGDDSPNIVKENFIWSKTIPFKSGRVFEPNVKLKDIGKFRNLLTDEKVDILLSYNNTEIGKQVIENELIIGAGSYEFIRREQLFKEIQQMKRLSLRSVRGMGVPIRLNLK

SEQ ID NO: 145 - protein, 1127 aa, Prevotella buccae
MQKQDKLFVDRKKNAIFAFPKYITIMENQEKPEPIYYELTDKHFWAAFLNLARHNVYTTINHINRRLEIAELKDDGYMMDIKGSWNEQAKKLDKKVRLRDLIMKHFPFLEAAAYEITNSKSPNNKEQREKEQSEALSLNNLKNVLFIFLEKLQVLRNYYSHYKYSEESPKPIFETSLLKNMYKVFDANVRLVKRDYMHHENIDMQRDFTHLNRKKQVGRTKNIIDSPNFHYHFADKEGNMTIAGLLFFVSLFLDKKDAIWMQKKLKGFKDGRNLREQMTNEVFCRSRISLPKLKLENVQTKDWMQLDMLNELVRCPKSLYERLREKDRESFKVPFDIFSDDYDAEEEPFKNTLVRHQDRFPYFVLRYFDLNEIFEQLRFQIDLGTYHFSIYNKRIGDEDEVRHLTHHLYGFARIQDFAQQNQPEVWRKLVKDLDYFEASQEPYIPKTAPHYHLENEKIGIKFCSTHNNLFPSLKTEKTCNGRSKFNLGTQFTAEAFLSVHELLPMMFYYLLLTKDYSRKESADKVEGIIRKEISNIYAIYDAFANGEINSIADLTCRLQKTNILQGHLPKQMISILEGRQKDMEKEAERKIGEMIDDTQRRLDLLCKQTNQKIRIGKRNAGLLKSGKIADWLVNDMMRFQPVQKDQNNIPINNSKANSTEYRMLQRALALFGSENFRLKAYFNQMNLVGNDNPHPFLAETQWEHQTNILSFYRNYLEARKKYLKGLKPQNWKQYQHFLILKVQKTNRNTLVTGWKNSFNLPRGIFTQPIREWFEKHNNSKRIYDQILSFDRVGFVAKAIPLYFAEEYKDNVQPFYDYPFNIGNKLKPQKGQFLDKKERVELWQKNKELFKNYPSEKKKTDLAYLDFLSWKKFERELRLIKNQDIVTWLMFKELFNMATVEGLKIGEIHLRDIDTNTANEESNNILNRIMPMKLPVKTYETDNKGNILKERPLATFYIEETETKVLKQGNFKVLAKDRRLNGLLSFAETTDIDLEKNPITKLSVDHELIKYQTTRISIFEMTLGLEKKLINKYPTLPTDSFRNMLERWLQCKANRPELKNYVNSLIAVRNAFSHNQYPMYDATLFAEVKKFTLFPSVDTKKIELNIAPQLLEIVGKAIKEIEKSENKN

SEQ ID NO: 146 - protein, 1135 aa, Porphyromonas gingivalis
MNTVPASENKGQSRTVEDDPQYFGLYLNLARENLIEVESHVRIKFGKKKLNEESLKQSLLCDHLLSVDRWTKVYGHSRRYLPFLHYFDPDSQIEKDHDSKTGVDPDSAQRLIRELYSLLDFLRNDFSHNRLDGTTFEHLEVSPDISSFITGTYSLACGRAQSRFADFFKPDDFVLAKNRKEQLISVADGKECLTVSGLAFFICLFLDREQASGMLSRIRGFKRTDENWARAVHETFCDLCIRHPHDRLESSNTKEALLLDMLNELNRCPRILYDMLPEEERAQFLPALDENSMNNLSENSLNEESRLLWDGSSDWAEALTKRIRHQDRFPYLMLRFIEEMDLLKGIRFRVDLGEIELDSYSKKVGRNGEYDRTITDHALAFGKLSDFQNEEEVSRMISGEASYPVRFSLFAPRYAIYDNKIGYCHTSDPVYPKSKTGEKRALSNPQSMGFISVHNLRKLLLMELLCEGSFSRMQSDFLRKANRILDETAEGKLQFSALFPEMRHRFIPPQNPKSKDRREKAETTLEKYKQEIKGRKDKLNSQLLSAFDMNQRQLPSRLLDEWMNIRPASHSVKLRTYVKQLNEDCRLRLRKFRKDGDGKARAIPLVGEMATFLSQDIVRMIISEETKKLITSAYYNEMQRSLAQYAGEENRRQFRAIVAELHLLDPSSGHPFLSATMETAHRYTEDFYKCYLEKKREWLAKTFYRPEQDENTKRRISVFFVPDGEARKLLPLLIRRRMKEQNDLQDWIRNKQAHPIDLPSHLFDSKIMELLKVKDGKKKWNEAFKDWWSTKYPDGMQPFYGLRRELNIHGKSVSYIPSDGKKFADCYTHLMEKTVQDKKRELRTAGKPVPPDLAADIKRSFHRAVNEREFMLRLVQEDDRLMLMAINKMMTDREEDILPGLKNIDSILDEENQFSLAVHAKVLEKEGEGGDNSLSLVPATIEIKSKRKDWSKYIRYRYDRRVPGLMSHFPEHKATLDEVKTLLGEYDRCRIKIFDWAFALEGAIMSDRDLKPYLHESSSREGKSGEHSTLVKMLVEKKGCLTPDESQYLILIRNKAAHNQFPCAAEMPLIYRDVSAKVGSIEGSSAKDLPEGSSLVDSLWKKYEMIIRKILPILDPENRFFGKLLNNMSQPINDL

SEQ ID NO: 147 - protein, 1175 aa, Porphyromonas gingivalis
MTEQNEKPYNGTYYTLEDKHFWAAFFNLARHNAYITLAHIDRQLAYSKADITNDEDILFFKGQWKNLDNDLERKARLRSLILKHFSFLEGAAYGKKLFESQSSGNKSSKKKELTKKEKEELQANALSLDNLKSILFDFLQKLKDFRNYYSHYRHPESSELPLFDGNMLQRLYNVFDVSVQRVKRDHEHNDKVDPHRHFNHLVRKGKKDKYGNNDNPFFKHHFVDREEKVTEAGLLFFVSLFLEKRDAIWMQKKIRGFKGGTEAYQQMTNEVFCRSRISLPKLKLESLRTDDWMLLDMLNELVRCPKSLYDRLREEDRARFRVPVDILSDEDDTDGTEEDPFKNTLVRHQDRFPYFALRYFDLKKVFTSLRFHIDLGTYHFAIYKKNIGEQPEDRHLTRNLYGFGRIQDFAEEHRPEEWKRLVRDLDYFETGDKPYITQTTPHYHIEKGKIGLRFVPEGQLLWPSPEVGATRTGRSKYAQDKRFTAEAFLSVHELMPMMFYYFLLREKYSEEASAEKVQGRIKRVIEDVYAVYDAFARDEINTRDELDACLADKGIRRGHLPRQMIAILSQEHKDMEEKVRKKLQEMIADTDHRLDMLDRQTDRKIRIGRKNAGLPKSGVIADWLVRDMMRFQPVAKDTSGKPLNNSKANSTEYRMLQRALALFGGEKERLTPYFRQMNLTGGNNPHPFLHETRWESHTNILSFYRSYLKARKAFLQSIGRSDREENHRFLLLKEPKTDRQTLVAGWKSEFHLPRGIFTEAVRDCLIEMGYDEVGSYKEVGFMAKAVPLYFERACKDRVQPFYDYPFNVGNSLKPKKGRFLSKEKRAEEWESGKERFRDLEAWSHSAARRIEDAFVGIEYASWENKKKIEQLLQDLSLWETFESKLKVKADKINIAKLKKEILEAKEHPYHDFKSWQKFERELRLVKNQDIITWMMCRDLMEENKVEGLDTGTLYLKDIRTDVQEQGSLNVLNHVKPMRLPVVVYRADSRGHVHKEEAPLATVYIEERDTKLLKQGNFKSFVKDRRLNGLFSFVDTGALAMEQYPISKLRVEYELAKYQTARVCAFEQTLELEESLLTRYPHLPDESFREMLESWSDPLLDKWPDLQREVRLLIAVRNAFSHNQYPMYDETIFSSIRKYDPSSLDAIEERMGLNIAHRLSEEVKLAKEMVERIIQA

SEQ ID NO: 148 - protein, 1125 aa, Prevotella pallens; identical to SEQ ID NO: 130

SEQ ID NO: 149 - protein, 1157 aa, Myroides odoratimimus; identical to SEQ ID NO: 131

SEQ ID NO: 150 - protein, 1157 aa, Myroides odoratimimus; identical to SEQ ID NO: 132

SEQ ID NO: 151 - protein, 1127 aa, Prevotella species
MQKQDKLFVDRKKNAIFAFPKYITIMENQEKPEPIYYELTDKHFWAAFLNLARHNVYTTINHINRRLEIAELKDDGYMMGIKGSWNEQAKKLDKKVRLRDLIMKHFPFLEAAAYEITNSKSPNNKEQREKEQSEALSLNNLKNVLFIFLEKLQVLRNYYSHYKYSEESPKPIFETSLLKNMYKVFDANVRLVKRDYMHHENIDMQRDFTHLNRKKQVGRTKNIIDSPNFHYHFADKEGNMTIAGLLFFVSLFLDKKDAIWMQKKLKGFKDGRNLREQMTNEVFCRSRISLPKLKLENVQTKDWMQLDMLNELVRCPKSLYERLREKDRESFKVPFDIFSDDYDAEEEPFKNTLVRHQDRFPYFVLRYFDLNEIFEQLRFQIDLGTYHFSIYNKRIGDEDEVRHLTHHLYGFARIQDFAPQNQPEEWRKLVKDLDHFETSQEPYISKTAPHYHLENEKIGIKFCSTHNNLFPSLKREKTCNGRSKFNLGTQFTAEAFLSVHELLPMMFYYLLLTKDYSRKESADKVEGIIRKEISNIYAIYDAFANNEINSIADLTCRLQKTNILQGHLPKQMISILEGRQKDMEKEAERKIGEMIDDTQRRLDLLCKQTNQKIRIGKRNAGLLKSGKIADWLVSDMMRFQPVQKDTNNAPINNSKANSTEYRMLQHALALFGSESSRLKAYFRQMNLVGNANPHPFLAETQWEHQTNILSFYRNYLEARKKYLKGLKPQNWKQYQHFLILKVQKTNRNTLVTGWKNSFNLPRGIFTQPIREWFEKHNNSKRIYDQILSFDRVGFVAKAIPLYFAEEYKDNVQPFYDYPFNIGNKLKPQKGQFLDKKERVELWQKNKELFKNYPSEKNKTDLAYLDFLSWKKFERELRLIKNQDIVTWLMFKELFKTTTVEGLKIGEIHLRDIDTNTANEESNNILNRIMPMKLPVKTYETDNKGNILKERPLATFYIEETETKVLKQGNFKVLAKDRRLNGLLSFAETTDIDLEKNPITKLSVDYELIKYQTTRISIFEMTLGLEKKLIDKYSTLPTDSFRNMLERWLQCKANRPELKNYVNSLIAVRNAFSHNQYPMYDATLFAEVKKFTLFPSVDTKKIELNIAPQLLEIVGKAIKEIEKSENKN

SEQ ID NO: 152 - protein, 1119 aa, Porphyromonas gingivalis
MTEQNERPYNGTYYTLEDKHFWAAFFNLARHNAYITLAHIDRQLAYSKADITNDEDILFFKGQWKNLDNDLERKARLRSLILKHFSFLEGAAYGKKLFESQSSGNKSSKKKELTKKEKEELQANALSLDNLKSILFDFLQKLKDFRNYYSHYRHPESSELPLFDGNMLQRLYNVFDVSVQRVKRDHEHNDKVDPHRHFNHLVRKGKKDRYGNNDNPFFKHHFVDREEKVTEAGLLFFVSLFLEKRDAIWMQKKIRGFKGGTETYQQMTNEVFCRSRISLPKLKLESLRTDDWMLLDMLNELVRCPKSLYDRLREEDRARFRVPVDILSDEDDTDGTEEDPFKNTLVRHQDRFPYFALRYFDLKKVFTSLRFHIDLGTYHFAIYKKNIGEQPEDRHLTRNLYGFGRIQDFAEEHRPEEWKRLVRDLDYFETGDKPYITQTTPHYHIEKGKIGLRFVPEGQHLWPSPEVGATRTGRSKYAQDKRLTAEAFLSVHELMPMMFYYFLLREKYSDEASAERVQGRIKRVIEDVYAVYDAFARGEINTRDELDACLADKGIRRGHLPRQMIGILSQEHKDMEEKVRKKLQEMIVDTDHRLDMLDRQTDRKIRIGRKNAGLPKSGVIADWLVRDMMRFQPVAKDTSGKPLNNSKANSTEYRMLQRALALFGGEKERLTPYFRQMNLTGGNNPHPFLHETRWESHTNILSFYRSYLKARKAFLQSIGRSDRVENHRFLLLKEPKTDRQTLVAGWKGEFHLPRGIFTEAVRDCLIEMGLDEVGSYKEVGFMAKAVPLYFERACKDRVQPFYDYPFNVGNSLKPKKGRFLSKEKRAEEWESGKERFRLAKLKKEILEAKEHPYLDFKSWQKFERELRLVKNQDIITWMICRDLMEENKVEGLDTGTLYLKDIRTDVQEQGNLNVLNRVKPMRLPVVVYRADSRGHVHKEQAPLATVYIEERDTKLLKQGNFKSFVKDRRLNGLFSFVDTGALAMEQYPISKLRVEYELAKYQTARVCAFEQTLELEESLLTRYPHLPDKNFRKMLESWSDPLLDKWPDLHGNVRLLIAVRNAFSHNQYPMYDEAVFSSIRKYDPSSPDAIEERMGLNIAHRLSEEVKQAKEMAERIIQA

SEQ ID NO: 153 - protein, 1154 aa, Paludibacter propionicigenes
MKTSANNIYFNGINSFKKIFDSKGAIAPIAEKSCRNFDIKAQNDVNKEQRIHYFAVGHTFKQLDTENLFEYVLDENLRAKRPTRFISLQQFDKEFIENIKRLISDIRNINSHYIHRFDPLKIDAVPTNIIDFLKESFELAVIQIYLKEKGINYLQFSENPHADQKLVAFLHDKFLPLDEKKTSMLQNETPQLKEYKEYRKYFKTLSKQAAIDQLLFAEKETDYIWNLFDSHPVLTISAGKYLSFYSCLFLLSMFLYKSEANQLISKIKGFKKNTTEEEKSKREIFTFFSKRFNSMDIDSEENQLVKFRDLILYLNHYPVAWNKDLELDSSNPAMTDKLKSKIIELEINRSFPLYEGNERFATFAKYQIWGKKHLGKSIEKEYINASFTDEEITAYTYETDTCPELKDAHKKLADLKAAKGLFGKRKEKNESDIKKTETSIRELQHEPNPIKDKLIQRIEKNLLTVSYGRNQDRFMDFSARFLAEINYFGQDASFKMYHFYATDEQNSELEKYELPKDKKKYDSLKFHQGKLVHFISYKEHLKRYESWDDAFVIENNAIQLKLSFDGVENTVTIQRALLIYLLEDALRNIQNNTAENAGKQLLQEYYSHNKADLSAFKQILTQQDSIEPQQKTEFKKLLPRRLLNNYSPAINHLQTPHSSLPLILEKALLAEKRYCSLVVKAKAEGNYDDFIKRNKGKQFKLQFIRKAWNLMYFRNSYLQNVQAAGHHKSFHIERDEFNDFSRYMFAFEELSQYKYYLNEMFEKKGFFENNEFKILFQSGTSLENLYEKTKQKFEIWLASNTAKTNKPDNYHLNNYEQQFSNQLFFINLSHFINYLKSTGKLQTDANGQIIYEALNNVQYLIPEYYYTDKPERSESKSGNKLYNKLKATKLEDALLYEMAMCYLKADKQIADKAKHPITKLLTSDVEFNITNKEGIQLYHLLVPFKKIDAFIGLKMHKEQQDKKHPTSFLANIVNYLELVKNDKDIRKTYEAFSTNPVKRTLTYDDLAKIDGHLISKSIKFTNVTLELERYFIFKESLIVKKGNNIDFKYIKGLRNYYNNEKKKNEGIRNKAFHFGIPDSKSYDQLIRDAEVMFIANEVKPTHATKYTDLNKQLHTVCDKLMETVHNDYFSKEGDGKKKREAAGQKYFENIISAK

SEQ ID NO: 154 - protein, 1119 aa, Porphyromonas gingivalis
MTEQNEKPYNGTYYTLEDKHFWAAFFNLARHNAYITLAHIDRQLAYSKADITNDEDILFFKGQWKNLDNDLERKARLRSLILKHFSFLEGAAYGKKLFESQSSGNKSSKNKELTKKEKEELQANALSLDNLKSILFDFLQKLKDFRNYYSHYRHPESSELPLFDGNMLQRLYNVFDVSVQRVKRDHEHNDKVDPHRHFNHLVRKGKKDRYGNNDNPFFKHHFVDREGTVTEAGLLFFVSLFLEKRDAIWMQKKIRGFKGGTETYQQMTNEVFCRSRISLPKLKLESLRTDDWMLLDMLNELVRCPKSLYDRLREEDRARFRVPVDILSDEEDTDGAEEDPFKNTLVRHQDRFPYFALRYFDLKKVFTSLRFQIDLGTYHFAIYKKNIGEQPEDRHLTRNLYGFGRIQDFAEEHRPEEWKRLVRDLDYFETGDKPYITQTTPHYHIEKGKIGLRFVPEGQHLWPSPEVGATRTGRSKYAQDKRFTAEAFLSAHELMPMMFYYFLLREKYSEEASAERVQGRIKRVIEDVYAVYDAFARDEINTRDELDACLADKGIRRGHLPRQMIGILSQEHKDMEEKIRKKLQEMMADTDHRLDMLDRQTDRKIRIGRKNAGLPKSGVIADWLVRDMMRFQPVAKDTSGKPLNNSKANSTEYRMLQRALALFGGEKERLTPYFRQMNLTGGNNPHPFLHETRWESHTNILSFYRSYLKARKAFLQSIGRSDRVENHRFLLLKEPKTDRQTLVAGWKGEFHLPRGIFTEAVRDCLIEMGLDEVGSYKEVGFMAKAVPLYFERACKDWVQPFYNYPFNVGNSLKPKKGRFLSKEKRAEEWESGKERFRLAKLKKEILEAKEHPYLDFKSWQKFERELRLVKNQDIITWMICGDLMEENKVEGLDTGTLYLKDIRTDVQEQGSLNVLNRVKPMRLPVVVYRADSRGHVHKEQAPLATVYIEERDTKLLKQGNFKSFVKDRRLNGLFSFVDTGALAMEQYPISKLRVEYELAKYQTARVCAFEQTLELEESLLTRCPHLPDKNFRKMLESWSDPLLDKWPDLHRKVRLLIAVRNAFSHNQYPMYDEAVFSSIRKYDPSFPDAIEERMGLNIAHRLSEEVKQAKETVERIIQA

SEQ ID NO: 155 - protein, 1179 aa, Flavobacterium columnare
MSSKNESYNKQKTFNHYKQEDKYFFGGFLNNADDNLRQVGKEFKTRINFNHNNNELASVFKDYFNKEKSVAKREHALNLLSNYFPVLERIQKHTNHNFEQTREIFELLLDTIKKLRDYYTHHYHKPITINPKIYDFLDDTLLDVLITIKKKKVKNDTSRELLKEKLRPELTQLKNQKREELIKKGKKLLEENLENAVFNHCLRPFLEENKTDDKQNKTVSLRKYRKSKPNEETSITLTQSGLVFLMSFFLHRKEFQVFTSGLEGFKAKVNTIKEEEISLNKNNIVYMITHWSYSYYNFKGLKHRIKTDQGVSTLEQNNTTHSLTNTNTKEALLTQIVDYLSKVPNEIYETLSEKQQKEFEEDINEYMRENPENEDSTFSSIVSHKVIRKRYENKFNYFAMRFLDEYAELPTLRFMVNFGDYIKDRQKKILESIQFDSERIIKKEIHLFEKLSLVTEYKKNVYLKETSNIDLSRFPLFPNPSYVMANNNIPFYIDSRSNNLDEYLNQKKKAQSQNKKRNLTFEKYNKEQSKDAIIAMLQKEIGVKDLQQRSTIGLLSCNELPSMLYEVIVKDIKGAELENKIAQKIREQYQSIRDFTLDSPQKDNIPTTLIKTINTDSSVTFENQPIDIPRLKNAIQKELTLTQEKLLNVKEHEIEVDNYNRNKNTYKFKNQPKNKVDDKKLQRKYVFYRNEIRQEANWLASDLIHFMKNKSLWKGYMHNELQSFLAFFEDKKNDCIALLETVFNLKEDCILTKGLKNLFLKHGNFIDFYKEYLKLKEDFLNTESTFLENGLIGLPPKILKKELSKRFKYIFIVFQKRQFIIKELEEKKNNLYADAINLSRGIFDEKPTMIPFKKPNPDEFASWFVASYQYNNYQSFYELTPDIVERDKKKKYKNLRAINKVKIQDYYLKLMVDTLYQDLFNQPLDKSLSDFYVSKAEREKIKADAKAYQKRNDSSLWNKVIHLSLQNNRITANPKLKDIGKYKRALQDEKIATLLTYDDRTWTYALQKPEKENENDYKELHYTALNMELQEYEKVRSKELLKQVQELEKQILEEYTDFLSTQIHPADFEREGNPNFKKYLAHSILENEDDLDKLPEKVEAMRELDETITNPIIKKAIVLIIIRNKMAHNQYPPKFIYDLANRFVPKKEEEYFATYFNRVFETITKELWENKEKKDKTQV

SEQ ID NO: 156 - protein, 1145 aa, Psychroflexus torquis
MESIIGLGLSFNPYKTADKHYFGSFLNLVENNLNAVFAEFKERISYKAKDENISSLIEKHFIDNMSIVDYEKKISILNGYLPIIDFLDDELENNLNTRVKNFKKNFIILAEAIEKLRDYYTHFYHDPITFEDNKEPLLELLDEVLLKTILDVKKKYLKTDKTKEILKDSLREEMDLLVIRKTDELREKKKTNPKIQHTDSSQIKNSIFNDAFQGLLYEDKGNNKKTQVSHRAKTRLNPKDIHKQEERDFEIPLSTSGLVFLMSLFLSKKEIEDFKSNIKGFKGKVVKDENHNSLKYMATHRVYSILAFKGLKYRIKTDTFSKETLMMQMIDELSKVPDCVYQNLSETKQKDFIEDWNEYFKDNEENTENLENSRVVHPVIRKRYEDKFNYFAIRFLDEFANFKTLKFQVFMGYYIHDQRTKTIGTTNITTERTVKEKINVFGKLSKMDNLKKHFFSQLSDDENTDWEFFPNPSYNFLTQADNSPANNIPIYLELKNQQIIKEKDAIKAEVNQTQNRNPNKPSKRDLLNKILKTYEDFHQGDPTAILSLNEIPALLHLFLVKPNNKTGQQIENIIRIKIEKQFKAINHPSKNNKGIPKSLFADTNVRVNAIKLKKDLEAELDMLNKKHIAFKENQKASSNYDKLLKEHQFTPKNKRPELRKYVFYKSEKGEEATWLANDIKRFMPKDFKTKWKGCQHSELQRKLAFYDRHTKQDIKELLSGCEFDHSLLDINAYFQKDNFEDFFSKYLENRIETLEGVLKKLHDFKNEPTPLKGVFKNCFKFLKRQNYVTESPEIIKKRILAKPTFLPRGVFDERPTMKKGKNPLKDKNEFAEWFVEYLENKDYQKFYNAEEYRMRDADFKKNAVIKKQKLKDFYTLQMVNYLLKEVFGKDEMNLQLSELFQTRQERLKLQGIAKKQMNKETGDSSENTRNQTYIWNKDVPVSFFNGKVTIDKVKLKNIGKYKRYERDERVKTFIGYEVDEKWMMYLPHNWKDRYSVKPINVIDLQIQEYEEIRSHELLKEIQNLEQYIYDHTTDKNILLQDGNPNFKMYVLNGLLIGIKQVNIPDFIVLKQNTNFDKIDFTGIASCSELEKKTIILIAIRNKFAHNQLPNKMIYDLANEFLKIEKNETYANYYLKVLKKMISDLA

SEQ ID NO: 157 - protein, 948 aa, Riemerella anatipestifer
MFFSFHNAQRVIFKHLYKAFDASLRMVKEDYKAHFTVNLTRDFAHLNRKGKNKQDNPDFNRYRFEKDGFFTESGLLFFTNLFLDKRDAYWMLKKVSGFKASHKQREKMTTEVFCRSRILLPKLRLESRYDHNQMLLDMLSELSRCPKLLYEKLSEENKKHFQVEADGFLDEIEEEQNPFKDTLIRHQDRFPYFALRYLDLNESFKSIRFQVDLGTYHYCIYDKKIGDEQEKRHLTRTLLSFGRLQDFTEINRPQEWKALTKDLDYKETSNQPFISKTTPHYHITDNKIGFRLGTSKELYPSLEIKDGANRIAKYPYNSGFVAHAFISVHELLPLMFYQHLTGKSEDLLKETVRHIQRIYKDFEEERINTIEDLEKANQGRLPLGAFPKQMLGLLQNKQPDLSEKAKIKIEKLIAETKLLSHRLNTKLKSSPKLGKRREKLIKTGVLADWLVKDFMRFQPVAYDAQNQPIKSSKANSTEFWFIRRALALYGGEKNRLEGYFKQTNLIGNTNPHPFLNKFNWKACRNLVDFYQQYLEQREKFLEAIKHQPWEPYQYCLLLKVPKENRKNLVKGWEQGGISLPRGLFTEAIRETLSKDLTLSKPIRKEIKKHGRVGFISRAITLYFKEKYQDKHQSFYNLSYKLEAKAPLLKKEEHYEYWQQNKPQSPTESQRLELHTSDRWKDYLLYKRWQHLEKKLRLYRNQDIMLWLMTLELTKNHFKELNLNYHQLKLENLAVNVQEADAKLNPLNQTLPMVLPVKVYPTTAFGEVQYHETPIRTVYIREEQTKALKMGNFKALVKDRRLNGLFSFIKEENDTQKHPISQLRLRRELEIYQSLRVDAFKETLSLEEKLLNKHASLSSLENEFRTLLEEWKKKYAASSMVTDKHIAFIASVRNAFCHNQYPFYKETLHAPILLFTVAQPTTEEKDGLGIAEALLKVLREYCEIVKSQI

SEQ ID NO: 158 - protein, 1139 aa, Prevotella pleuritidis
MENDKRLEESACYTLNDKHFWAAFLNLARHNVYITVNHINKTLELKNKKNQEIIIDNDQDILAIKTHWAKVNGDLNKTDRLRELMIKHFPFLEAAIYSNNKEDKEEVKEEKQAKAQSFKSLKDCLFLFLEKLQEARNYYSHYKYSESSKEPEFEEGLLEKMYNTFDASIRLVKEDYQYNKDIDPEKDFKHLERKEDFNYLFTDKDNKGKITKNGLLFFVSLFLEKKDAIWMQQKFRGFKDNRGNKEKMTHEVFCRSRMLLPKIRLESTQTQDWILLDMLNELIRCPKSLYERLQGAYREKFKVPFDSIDEDYDAEQEPFRNTLVRHQDRFPYFALRYFDYNEIFKNLRFQIDLGTYHFSIYKKLIGGKKEDRHLTHKLYGFERIQEFTKQNRPDKWQAIIKDLDTYETSNERYISETTPHYHLENQKIGIRFRNDNNDIWPSLKTNGEKNEKSKYNLDKPYQAEAFLSVHELLPMMFYYLLLKMENTDNDKEDNEVGTKKKGNKNNKQEKHKIEEIIENKIKDIYALYDAFTNGEINSIDELAEQREGKDIEIGHLPKQLIVILKNKSKDMAEKANRKQKEMIKDTKKRLATLDKQVKGEIEDGGRNIRLLKSGEIARWLVNDMMRFQPVQKDNEGKPLNNSKANSTEYQMLQRSLALYNKEEKPTRYFRQVNLIKSSNPHPFLEDTKWEECYNILSFYRNYLKAKIKFLNKLKPEDWKKNQYFLMLKEPKTNRKTLVQGWKNGFNLPRGIFTEPIKEWFKRHQNDSEEYKKVEALDRVGLVAKVIPLFFKEEYFKEDAQKEINNCVQPFYSFPYNVGNIHKPEEKNFLHCEERRKLWDKKKDKFKGYKAKEKSKKMTDKEKEEHRSYLEFQSWNKFERELRLVRNQDILTWLLCTKLIDKLKIDELNIEELQKLRLKDIDTDTAKKEKNNILNRVMPMRLPVTVYEIDKSFNIVKDKPLHTVYIEETGTKLLKQGNFKALVKDRRLNGLFSFVKTSSEAESKSKPISKLRVEYELGAYQKARIDIIKDMLALEKTLIDNDENLPTNKFSDMLKSWLKGKGEANKARLQNDVGLLVAVRNAFSHNQYPMYNSEVFKGMKLLSLSSDIPEKEGLGIAKQLKDKIKETIERIIEIEKEIRN

SEQ ID NO: 159 - protein, 1135 aa, Porphyromonas gingivalis; identical to SEQ ID NO: 137

SEQ ID NO: 160 - protein, 1135 aa, Porphyromonas gingivalis
MNTVPASENKGQSRTVEDDPQYFGLYLNLARENLIEVESHVRIKFGKKKLNEESLKQSLLCDHLLSVDRWTKVYGHSRRYLPFLHYFDPDSQIEKDHDSKTGVDPDSAQRLIRELYSLLDFLRNDFSHNRLDGTTFEHLEVSPDISSFITGTYSLACGRAQSRFADFFKPDDFVLAKNRKEQLISVADGKECLTVSGLAFFICLFLDREQASGMLSRIRGFKRTNENWARAVHETFCDLCIRHPHDRLESSNTKEALLLDMLNELNRCPRILYDMLPEEERAQFLPALDENSMNNLSENSLNEESRLLWDGSSDWAEALTKRIRHQDRFPYLMLRFIEEMDLLKGIRFRVDLGEIELDSYSKKVGRNGEYDRTITDHALAFGKLSDFQNEEEVSRMISGEASYPVRFSLFAPRYAIYDNKIGYCHTSDPVYPKSKTGEKRALSNPQSMGFISVHDLRKLLLMELLCEGSFSRMQSGFLRKANRILDETAEGKLQFSALFPEMRHRFIPPQNPKSKDRREKAETTLEKYKQEIKGRKDKLNSQLLSAFDMNQRQLPSRLLDEWMNIRPASHSVKLRTYVKQLNEDCRLRLRKFRKDGDGKARAIPLVGEMATFLSQDIVRMIISEETKKLITSAYYNEMQRSLAQYAGEENRRQFRAIVAELHLLDPSSGHPFLSATMETAHRYTEDFYKCYLEKKREWLAKTFYRPEQDENTKRRISVFFVPDGEARKLLPLLIRRRMKEQNDLQDWIRNKQAHPIDLPSHLFDSKIMELLKVKDGKKKWNEAFKDWWSTKYPDGMQPFYGLRRELNIHGKSVSYIPSDGKKFADCYTHLMEKTVQDKKRELRTAGKPVPPDLAADIKRSFHRAVNEREFMLRLVQEDDRLMLMAINKMMTDREEDILPGLKNIDSILDKENQFSLAVHAKVLEKEGEGGDNSLSLVPATIEIKSKRKDWSKYIRYRYDRRVPGLMSHFPEHKATLDEVKTLLGEYDRCRIKIFDWAFALEGAIMSDRDLKPYLHESSSREGKSGEHSTLVKMLVEKKGCLTPDESQYLILIRNKAAHNQFPCAAEMPLIYRDVSAKVGSIEGSSAKDLPEGSSLVDSLWKKYEMIIRKILPILDHENRFFGKLLNNMSQPINDL

SEQ ID NO: 161 - protein, 1135 aa, Porphyromonas gingivalis; identical to SEQ ID NO: 138

SEQ ID NO: 162 - protein, 1135 aa, Porphyromonas gingivalis; identical to SEQ ID NO: 139

SEQ ID NO: 163 - protein, 1135 aa, Porphyromonas gingivalis
MNTVPASENKGQSRTVEDDPQYFGLYLNLARENLIEVESHVRIKFGKKKLNEESLKQSLLCDHLLSVDRWTKVYGHSRRYLPFLHYFDPDSQIEKDHDSKTGVDPDSAQRLIRELYSLLDFLRNDFSHNRLDGTTFEHLEVSPDISSFITGTYSLACGRAQSRFADFFKPDDFVLAKNRKEQLISVADGKECLTVSGLAFFICLFLDREQASGMLSRIRGFKRTDENWARAVHETFCDLCIRHPHDRLESSNTKEALLLDMLNELNRCPRILYDMLPEEERAQFLPALDENSMNNLSENSLNEESRLLWDGSSDWAEALTKRIRHQDRFPYLMLRFIEEMDLLKGIRFRVDLGEIELDSYSKKVGRNGEYDRTITDHALAFGKLSDFQNEEEVSRMISGEASYPVRFSLFAPRYAIYDNKIGYCHTSDPVYPKSKTGEKRALSNPRSMGFISVHDLRKLLLMELLCEGSFSRMQSDFLRKANRILDETAEGKLQFSALFPEMRHRFIPPQNPKSKDRREKAETTLEKYKQEIKGRKDKLNSQLLSAFDMNQRQLPSRLLDEWMNIRPASHSVKLRTYVKQLNEDCRLRLRKFRKDGDGKARAIPLVGEMATFLSQDIVRMIISEETKKLITSAYYNEMQRSLAQYAGEENRRQFRAIVAELHLLDPSSGHPFLSATMETAHRYTEDFYKCYLEKKREWLAKTFYRPEQDENTKRRISVFFVPDGEARKLLPLLIRRRMKEQNDLQDWIRNKQAHPIDLPSHLFDSKIMELLKVKDGKKKWNEAFKDWWSTKYPDGMQPFYGLRRELNIHGKSVSYIPSDGKKFADCYTHLMEKTVQDKKRELRTAGKPVPPDLAADIKRSFHRAVNEREFMLRLVQEDDRLMLMAINKMMTDREEDILPGLKNIDSILDEENQFSLAVHAKVLEKEGEGGDNSLSLVPATIEIKSKRKDWSKYIRYRYDRRVPGLMSHFPEHKATLDEVKTLLGEYDRCRIKIFDWAFALEGAIMSDRDLKPYLHESSSREGKSGEHSTLVKMLVEKKGCLTPDESQYLILIRNKAAHNQFPCAAEMPLIYRDVSAKVGSIEGSSAKDLPEGSSLVDSLWKKYEMIIRKILPILDPENRFFGKLLNNMSQPINDL

SEQ ID NO: 164 - protein, 1133 aa, Prevotella falsenii
MKNDNNSTKSTDYTLGDKHFWAAFLNLARHNVYITVNHINKVLELKNKKDQEIIIDNDQDILAIKTLWGKVDTDINKKDRLRELIMKHFPFLEAATYQQSSTNNTKQKEEEQAKAQSFESLKDCLFLFLEKLREARNYYSHYKHSKSLEEPKLEEKLLENMYNIFDTNVQLVIKDYEHNKDINPEEDFKHLGRAEGEFNYYFTRNKKGNITESGLLFFVSLFLEKKDAIWAQTKIKGFKDNRENKQKMTHEVFCRSRMLLPKLRLESTQTQDWILLDMLNELIRCPKSLYKRLQGEKREKFRVPFDPADEDYDAEQEPFKNTLVRHQDRFPYFALRYFDYNEIFTNLRFQIDLGTYHFSIYKKQIGDKKEDRHLTHKLYGFERIQEFAKENRPDEWKALVKDLDTFEESNEPYISETTPHYHLENQKIGIRNKNKKKKKTIWPSLETKTTVNERSKYNLGKSFKAEAFLSVHELLPMMFYYLLLNKEEPNNGKINASKVEGIIEKKIRDIYKLYGAFANEEINNEEELKEYCEGKDIAIRHLPKQMIAILKNEYKDMAKKAEDKQKKMIKDTKKRLAALDKQVKGEVEDGGRNIKPLKSGRIASWLVNDMMRFQPVQRDRDGYPLNNSKANSTEYQLLQRTLALFGSERERLAPYFRQMNLIGKDNPHPFLKDTKWKEHNNILSFYRSYLEAKKNFLGSLKPEDWKKNQYFLKLKEPKTNRETLVQGWKNGFNLPRGIFTEPIREWFIRHQNESEEYKKVKDFDRIGLVAKVIPLFFKEDYQKEIEDYVQPFYGYPFNVGNIHNSQEGTFLNKKEREELWKGNKTKFKDYKTKEKNKEKTNKDKFKKKTDEEKEEFRSYLDFQSWKKFERELRLVRNQDIVTWLLCMELIDKLKIDELNIEELQKLRLKDIDTDTAKKEKNNILNRIMPMELPVTVYETDDSNNIIKDKPLHTIYIKEAETKLLKQGNFKALVKDRRLNGLFSFVETSSEAELKSKPISKSLVEYELGEYQRARVEIIKDMLRLEETLIGNDEKLPTNKFRQMLDKWLEHKKETDDTDLKNDVKLLTEVRNAFSHNQYPMRDRIAFANIKPFSLSSANTSNEEGLGIAKKLKDKTKETIDRIIEIEEQTATKR

SEQ ID NO: 165 - protein, 1116 aa, Prevotella pleuritidis
MENDKRLEESTCYTLNDKHFWAAFLNLARHNVYITINHINKLLEIRQIDNDEKVLDIKALWQKVDKDINQKARLRELMIKHFPFLEAAIYSNNKEDKEEVKEEKQAKAQSFKSLKDCLFLFLEKLQEARNYYSHYKSSESSKEPEFEEGLLEKMYNTFGVSIRLVKEDYQYNKDIDPEKDFKHLERKEDFNYLFTDKDNKGKITKNGLLFFVSLFLEKKDAIWMQQKLRGFKDNRGNKEKMTHEVFCRSRMLLPKIRLESTQTQDWILLDMLNELIRCPKSLYERLQGAYREKFKVPFDSIDEDYDAEQEPFRNTLVRHQDRFPYFALRYFDYNEIFKNLRFQIDLGTYHFSIYKKLIGDNKEDRHLTHKLYGFERIQEFAKQKRPNEWQALVKDLDIYETSNEQYISETTPHYHLENQKIGIRFKNKKDKIWPSLETNGKENEKSKYNLDKSFQAEAFLSIHELLPMMFYDLLLKKEEPNNDEKNASIVEGFIKKEIKRMYAIYDAFANEEINSKEGLEEYCKNKGFQERHLPKQMIAILTNKSKNMAEKAKRKQKEMIKDTKKRLATLDKQVKGEIEDGGRNIRLLKSGEIARWLVNDMMRFQSVQKDKEGKPLNNSKANSTEYQMLQRSLALYNKEQKPTPYFIQVNLIKSSNPHPFLEETKWEECNNILSFYRSYLEAKKNFLESLKPEDWKKNQYFLMLKEPKTNRKTLVQGWKNGFNLPRGIFTEPIKEWFKRHQNDSEEYKKVEALDRVGLVAKVIPLFFKEEYFKEDAQKEINNCVQPFYSFPYNVGNIHKPEEKNFLHCEERRKLWDKKKDKFKGYKAKEKSKKMTDKEKEEHRSYLEFQSWNKFERELRLVRNQDIVTWLLCTELIDKLKIDELNIEELQKLRLKDIDTDTAKKEKNNILNRIMPMQLPVTVYEIDKSFNIVKDKPLHTIYIEETGTKLLKQGNFKALVKDRRLNGLFSFVKTSSEAESKSKPISKLRVEYELGAYQKARIDIIKDMLALEKTLIDNDENLPTNKFSDMLKSWLKGKGEANKARLQNDVDLLVAIRNAFSHNQYPMYNSEVFKGMKLLSLSSDIPEKEGLGIAKQLKDKIKETIERIIEIEKEIRN

SEQ ID NO: 166 - protein, 1119 aa, Porphyromonas gingivalis
MTEQNERPYNGTYYTLEDKHFWAAFFNLARHNAYITLAHIDRQLAYSKADITNDEDILFFKGQWKNLDNDLERKARLRSLILKHFSFLEGAAYGKKLFESQSSGNKSSKKKELTKKEKEELQANALSLDNLKSILFDFLQKLKDFRNYYSHYRHPESSELPLFDGNMLQRLYNVFDVSVQRVKRDHEHNDKVDPHRHFNHLVRKGKKDRYGNNDNPFFKHHFVDREGTVTEAGLLFFVSLFLEKRDAIWMQKKIRGFKGGTEAYQQMTNEVFCRSRISLPKLKLESLRTDDWMLLDMLNELVRCPKSLYDRLREEDRARFRVPIDILSDEDDTDGTEEDPFKNTLVRHQDRFPYFALRYFDLKKVFTSLRFHIDLGTYHFAIYKKNIGEQPEDRHLTRNLYGFGRIQDFAEEHRPEEWKRLVRDLDYFETGDKPYITQTTPHYHIEKGKIGLRFVPEGQHLWPSPEVGATRTGRSKYAQDKRLTAEAFLSVHELMPMMFYYFLLREKYSEEVSAEKVQGRIKRVIEDVYAVYDAFARGEIDTLDRLDACLADKGIRRGHLPRQMIAILSQEHKDMEEKVRKKLQEMIADTDHRLDMLDRQTDRKIRIGRKNAGLPKSGVIADWLVRDMMRFQPVAKDTSGKPLNNSKANSTEYRMLQRALALFGGEKERLTPYFRQMNLTGGNNPHPFLHETRWESHTNILSFYRSYLKARKAFLQSIGRSDREENHRFLLLKEPKTDRQTLVAGWKSEFHLPRGIFTEAVRDCLIEMGYDEVGSYKEVGFMAKAVPLYFERACKDRVQPFYDYPFNVGNSLKPKKGRFLSKEKRAEEWESGKERFRLAKLKKEILEAKEHPYLDFKSWQKFERELRLVKNQDIITWMMCRDLMEENKVEGLDTGTLYLKDIRTDVHEQGSLNVLNRVKPMRLPVVVYRADSRGHVHKEQAPLATVYIEERDTKLLKQGNFKSFVKDRRLNGLFSFVDTGALAMEQYPISKLRVEYELAKYQTARVCAFEQTLELEESLLTRYPHLPDKNFRKMLESWSDPLLDKWPDLHRKVRLLIAVRNAFSHNQYPMYDEAVFSSIRKYDPSSPDAIEERMGLNIAHRLSEEVKQAKEMAERIIQV

SEQ ID NO: 167 - protein, 1175 aa, Porphyromonas gulae
MTEQSERPYNGTYYTLEDKHFWAAFLNLARHNAYITLTHIDRQLAYSKADITNDQDVLSFKALWKNLDNDLERKSRLRSLILKHFSFLEGAAYGKKLFESKSSGNKSSKNKELTKKEKEELQANALSLDNLKSILFDFLQKLKDFRNYYSHYRHSGSSELPLFDGNMLQRLYNVFDVSVQRVKRDHEHNDKVDPHRHFNHLVRKGKKDRYGHNDNPSFKHHFVDSEGMVTEAGLLFFVSLFLEKRDAIWMQKKIRGFKGGTETYQQMTNEVFCRSRISLPKLKLESLRMDDWMLLDMLNELVRCPKPLYDRLREDDRACFRVPVDILPDEDDTDGGGEDPFKNTLVRHQDRFPYFALRYFDLKKVFTSLRFHIDLGTYHFAIYKKMIGEQPEDRHLTRNLYGFGRIQDFAEEHRPEEWKRLVRDLDYFETGDKPYISQTSPHYHIEKGKIGLRFMPEGQHLWPSPEVGTTRTGRSKYAQDKRLTAEAFLSVHELMPMMFYYFLLREKYSEEVSAEKVQGRIKRVIEDVYAIYDAFARDEINTLKELDACLADKGIRRGHLPKQMIAILSQEHKNMEEKVRKKLQEMIADTDHRLDMLDRQTDRKIRIGRKNAGLPKSGVIADWLVRDMMRFQPVAKDASGKPLNNSKANSTEYRMLQRALALFGGEKERLTPYFRQMNLTGGNNPHPFLHDTRWESHTNILSFYRSYLRARKAFLERIGRSDRMENRPFLLLKEPKTDRQTLVAGWKSEFHLPRGIFTEAVRDCLIEMGYDEVGSYREVGFMAKAVPLYFERACEDRVQPFYDSPFNVGNSLKPKKGRFLSKEERAEEWERGKERFRDLEAWSHSAARRIEDAFAGIEYASPGNKKKIEQLLRDLSLWEAFESKLKVRADKINLAKLKKEILEAQEHPYHDFKSWQKFERELRLVKNQDIITWMMCRDLMEENKVEGLDTGTLYLKDIRTNVQEQGSLNVLNHVKPMRLPVVVYRADSRGHVHKEEAPLATVYIEERDTKLLKQGNFKSFVKDRRLNGLFSFVDTGGLAMEQYPISKLRVEYELAKYQTARVCAFEQTLELEESLLTRYPHLPDKNFRKMLESWSDPLLAKWPELHGKVRLLIAVRNAFSHNQYPMYDEAVFSSIRKYDPSSPDAIEERMGLNIAHRLSEEVKQAKETVERIIQA

SEQ ID NO: 168 - protein, 1119 aa, Porphyromonas gulae
MTEQSERPYNGTYYTLEDKHFWAAFLNLARHNAYITLTHIDRQLAYSKADITNDQDVLSFKALWKNLDNDLERKSRLRSLILKHFSFLEGAAYGKKLFESKSSGNKSSKNKELTKKEKEELQANALSLDNLKSILFDFLQKLKDFRNYYSHYRHSGSSELPLFDGNMLQRLYNVFDVSVQRVKRDHEHNDKVDPHRHFNHLVRKGKKDRYGHNDNPSFKHHFVDGEGMVTEAGLLFFVSLFLEKRDAIWMQKKIRGFKGGTETYQQMTNEVFCRSRISLPKLKLESLRTDDWMLLDMLNELVRCPKPLYDRLREKDRARFRVPVDILPDEDDTDGGGEDPFKNTLVRHQDRFPYFALRYFDLKKVFTSLRFHIDLGTYHFAIYKKVIGEQPEDRHLTRNLYGFGRIQDFAEEHRPEEWKRLVRDLDYFETGDKPYISQTTPHYHIEKGKIGLRFVPEGQHLWPSPEVGTTRTGRSKYAQDKRLTAEAFLSVHELMPMMFYYFLLREKYSEEVSAEKVQGRIKRVIEDVYAIYDAFARDEINTRDELDACLADKGIRRGHLPKQMIGILSQEHKNMEEKVRKKLQEMIADTDHRLDMLDRQTDRKIRIGRKNAGLPKSGVIADWLVRDMMRFQPVAKDTSGKPLNNSKANSTEYRMLQRALALFGGEKERLTPYFRQMNLTGGNNPHPFLDETRWESHTNILSFYRSYLRARKAFLERIGRSDRVENRPFLLLKEPKTDRQTLVAGWKSEFHLPRGIFTEAVRDCLIEMGYDEVGSYKEVGFMAKAVPLYFERACKDRVQPFYDSPFNVGNSLKPKKGRFLSKEKRAEEWESGKERFRLAKLKKEILEAQEHPYHDFKSWQKFERELRLVKNQDIITWMMCRDLMEENKVEGLDTGTLYLKDIRPNVQEQGSLNVLNRVKPMRLPVVVYRADSRGHVHKEEAPLATVYIEERDTKLLKQGNFKSFVKDRRLNGLFSFVDTGGLAMEQYPISKLRVEYELAKYQTARVCVFELTLRLEESLLSRYPHLPDESFREMLESWSDPLLAKWPELHGKVRLLIAVRNAFSHNQYPMYDEAVFSSIRKYDPSSPDAIEERMGLNIAHRLSEEVKQAKETVERIIQA

SEQ ID NO: 169 - protein, 1119 aa, Porphyromonas gulae
MTEQSERPYNGTYYTLEDKHFWAAFLNLARHNAYITLTHIDRQLAYSKADITNDQDVLSFKALWKNFDNDLERKSRLRSLILKHFSFLEGAAYGKKLFESKSSGNKSSKNKELTKKEKEELQANALSLDNLKSILFDFLQKLKDFRNYYSHYRHSGSSELPLFDGNMLQRLYNVFDVSVQRVKRDHEHNDKVDPHYHFNHLVRKGKKDRYGHNDNPSFKHHFVDSEGMVTEAGLLFFVSLFLEKRDAIWMQKKIRGFKGGTGPYEQMTNEVFCRSRISLPKLKLESLRTDDWMLLDMLNELVRCPKPLYDRLREKDRACFRVPVDILPDEDDTDGGGEDPFKNTLVRHQDRFPYFALRYFDLKKVFTSLRFHIDLGTYHFAIYKKMIGEQPEDRHLTRNLYGFGRIQDFAEEHRPEEWKRLVRDLDYFETGDKPYISQTTPHYHIEKGKIGLRFMPEGQHLWPSPEVGTTRTGRSKYAQDKRLTAEAFLSVHELMPMMFYYFLLREKYSEEVSAEKVQGRIKRVIKDVYAIYDAFARDEINTLKELDACSADKGIRRGHLPKQMIGILSQEHKNMEEKVRKKLQEMIADTDHRLDMLDRQTDRKIRIGRKNAGLPKSGVIADWLVRDMMRFQPVAKDTSGKPLNNSKANSTEYRMLQRALALFGGEKERLTPYFRQMNLTGGNNPHPFLDETRWESHTNILSFYRSYLRARKAFLERIGRSDRVENRPFLLLKEPKNDRQTLVAGWKSEFHLPRGIFTEAVRDCLIEMGYDEVGSYKEVGFMAKAVPLYFERACKDRVQPFYDSPFNVGNSLKPKKGRFLSKEKRAEEWESGKERFRLAKLKKEILEAKEHPYHDFKSWQKFERELRLVKNQDIITWMMCRDLMEENKVEGLDTGTLYLKDIRTDVHEQGSLNVLNRVKPMRLPVVVYRADSRGHVHKEQAPLATVYIEERDTKLLKQGNFKSFVKDRRLNGLFSFVDTGGLAMEQYPISKLRVEYELAKYQTARVCAFEQTLELEESLLTRYPHLPDENFREMLESWSDPLLGKWPDLHGKVRLLIAVRNAFSHNQYPMYDEAVFSSIRKYDPSSPDAIEERMGLNIAHRLSEEVKQAKETVERIIQA

SEQ ID NO: 170 - protein, 1175 aa, Porphyromonas gulae
MTEQSERPYNGTYYTLEDKHFWAAFLNLARHNAYITLTHIDRQLAYSKADITNDQDVLSFKALWKNFDNDLERKSRLRSLILKHFSFLEGAAYGKKLFESKSSGNKSSKNKELTKKEKEELQANALSLDNLKSILFDFLQKLKDFRNYYSHYRHSESSELPLFDGNMLQRLYNVFDVSVQRVKRDHEHNDKVDPHRHFNHLVRKGKKDRYGHNDNPSFKHHFVDGEGMVTEAGLLFFVSLFLEKRDAIWMQKKIRGFKGGTETYQQMTNEVFCRSRISLPKLKLESLRTDDWMLLDMLNELVRCPKPLYDRLREDDRACFRVPVDILPDEDDTDGGGEDPFKNTLVRHQDRFPYFALRYFDLKKVFTSLRFHIDLGTYHFAIYKKMIGEQPEDRHLTRNLYGFGRIQDFAEEHRPEEWKRLVRDLDYFETGDKPYISQTSPHYHIEKGKIGLRFMPEGQHLWPSPEVGTTRTGRSKYAQDKRLTAEAFLSVHELMPMMFYYFLLREKYSEEVSAEKVQGRIKRVIEDVYAIYDAFARDEINTLKELDACLADKGIRRGHLPKQMIAILSQEHKDMEEKIRKKLQEMIADTDHRLDMLDRQTDRKIRIGRKNAGLPKSGVIADWLVRDMMRFQPVAKDTSGKPLNNSKANSTEYRMLQRALALFGGEKKRLTPYFRQMNLTGGNNPHPFLHETRWESHTNILSFYRSYLRARKAFLERIGRSDRMENRPFLLLKEPKTDRQTLVAGWKSEFHLPRGIFTEAVRDCLIEMGYDEVGSYREVGFMAKAVPLYFERACEDRVQPFYDSPFNVGNSLKPKKGRFLSKEERAEEWERGKERFRDLEAWSHSAARRIEDAFAGIEYASPGNKKKIEQLLRDLSLWEAFESKLKVRADKINLAKLKKEILEAQEHPYHDFKSWQKFERELRLVKNQDIITWMMCRDLMEENKVEGLDTGTLYLKDIRPNVQEQGSLNVLNRVKPMRLPVVVYRADSRGHVHKEEAPLATVYIEERDTKLLKQGNFKSFVKDRRLNGLFSFVDTGGLAMEQYPISKLRVEYELAKYQTARVCVFELTLRLEESLLTRYPHLPDESFRKMLESWSDPLLAKWPELHGKVRLLIAVRNAFSHNQYPMYDEAVFSSIRKYDPSSPDAIEERMGLNIAHRLSEEVKQAKETVERIIQV

SEQ ID NO: 171 - protein, 1119 aa, Porphyromonas gulae
MTEQSERPYNGTYYTLEDKHFWAAFLNLARHNAYITLTHIDRQLAYSKADITNDEDILFFKGQWKNLDNDLERKSRLRSLILKHFSFLEGAAYGKKFFESKSSGNKSSKNKELTKKEKEELQANALSLDNLKSILFDFLQKLKDFRNYYSHYRHSGSSELPLFDGNMLQRLYNVFDVSVQRVKRDHEHNDEVDPHYHFNHLVRKGKKDRYGHNDNPSFKHHFVDGEGMVTEAGLLFFVSLFLEKRDAIWMQKKIRGFKGGTEPYEQMTNEVFCRSRISLPKLKLESLRTDDWMLLDMLNELVRCPKPLYDRLREKDRACFRVPVDILPDEDDTDGGGEDPFKNTLVRHQDRFPYFALRYFDLKKVFTSLRFHIDLGTYHFAIYKKMIGEQPEDRHLTRNLYGFGRIQDFAEEHRPEEWKRLVRDLDYFETGDKPYISQTTPHYHIEKGKIGLRFVPEGQHLWPSPEVGTTRTGRSKYAQDKRLTAEAFLSVHELMPMMFYYFLLREKYSEEVSAEKVQGRIKRVIEDVYAIYDAFARDEINTLKELDACLADKGIRRGHLPKQMIGILSQERKDMEEKVRKKLQEMIADTDHRLDMLDRQTDRKIRIGRKNAGLPKSGVIADWLVRDMMRFQPVAKDTSGKPLNNSKANSTEYRMLQRALALFGGEKERLTPYFRQMNLTGGNNPHPFLHETRWESHTNILSFYRSYLRARKAFLERIGRSDRVENCPFLLLKEPKTDRQTLVAGWKGEFHLPRGIFTEAVRDCLIEMGYDEVGSYREVGFMAKAVPLYFERACEDRVQPFYDSPFNVGNSLKPKKGRFLSKEKRAEEWESGKERFRLAKLKKEILEAQEHPYHDFKSWQKFERELRLVKNQDIITWMMCRDLMEENKVEGLDTGTLYLKDIRPNVQEQGSLNVLNRVKPMRLPVVVYRADSRGHVHKEEAPLATVYIEERDTKLLKQGNFKSFVKDRRLNGLFSFVDTGALAMEQYPISKLRVEYELAKYQTARVCAFEQTLELEESLLTRYPHLPDESFREMLESWSDPLLTKWPELHGKVRLLIAVRNAFSHNQYPMYDEAVFSSIWKYDPSSPDAIEERMGLNIAHRLSEEVKQAKETIERIIQA

SEQ ID NO: 172 - protein, 1174 aa, Porphyromonas gulae
MTEQSERPYNGTYYTLEDKHFWAAFLNLARHNAYITLTHIDRQLAYSKADITNDQDVLSFKALWKNLDNDLERKSRLRSLILKHFSFLEGAAYGKKLFESKSSGNKSSKNKELTKKEKEELQANALSLDNLKSILFDFLQKLKDFRNYYSHYRHSGSSELPLFDGNMLQRLYNVFDVSVQRVKRDHEHNDKVDPHYHFNHLVRKGKKDRYGHNDNPSFKHHFVDSEGMVTEAGLLFFVSLFLEKRDAIWMQKKIRGFKGGTGPYEQMTNEVFCRSRISLPKLKLESLRTDDWMLLDMLNELVRCPKPLYDRLREKDRACFRVPVDILPDEDDTDGGGEDPFKNTLVRHQDRFPYFALRYFDLKKVFTSLRFHIDLGTYHFAIYKKMIGEQPEDRHLTRNLYGFGRIQDFAEEHRPEEWKRLVRDLDYLETGDKPYISQTTPHYHIEKGKIGLRFVPEGQHLWPSPEVGTTRTGRSKCAQDKRLTAEAFLSVHELMPMMFYYFLLREKYSEEVSAEKVQGRIKRVIEDVYAIYDAFARDEINTLKELDTCLADKGIRRGHLPKQMITILSQERKDMKEKIRKKLQEMIADTDHRLDMLDRQTDRKIRIGRKNAGLPKSGVIADWLVRDMMRFQPVAKDASGKPLNNSKANSTEYRMLQRALALFGGEKERLTPYFRQMNLTGGNNPHPFLHETRWESHTNILSFYRSYLRARKAFLERIGRSDRVENCPFLLLKEPKTDRQTLVAGWKDEFHLPRGIFTEAVRDCLIEMGYDEVGSYREVGFMAKAVPLYFERACEDRVQPFYDSPFNVGNSLKPKKGRFLSKEDRAEEWERGMERFRDLEAWSHSAARRIKDAFAGIEYASPGNKKKIEQLLRDLSLWEAFESKLKVRADKINLAKLKKEILEAQEHPYHDFKSWQKFERELRLVKNQDIITWMMCRDLMEENKVEGLDTGTLYLKDIRPNVQEQGSLNVLNRVKPMRLPVVVYRADSRGHVHKEAPLATVYIEERNTKLLKQGNFKSFVKDRRLNGLFSFVDTGGLAMEQYPISKLRVEYELAKYQTARVCVFELTLRLEESLLSRYPHLPDESFREMLESWSDPLLAKWPELHGKVRLLIAVRNAFSHNQYPMYDEAVFSSIRKYDPSSPDAIEERMGLNIAHRLSEEVKQAKETVERIIQA

SEQ ID NO: 173 - protein, 1135 aa, Porphyromonas gulae
MNTVPATENKGQSRTVEDDPQYFGLYLNLARENLIEVESHVRIKFGKKKLNEESLKQSLLCDHLLSIDRWTKVYGHSRRYLPFLHCFDPDSGIEKDHDSKTGVDPDSAQRLIRELYSLLDFLRNDFSHNRLDGTTFEHLKVSPDISSFITGAYTFACERAQSRFADFFKPDDFLLAKNRKEQLISVADGKECLTVSGFAFFICLFLDREQASGMLSRIRGFKRTDENWARAVHETFCDLCIRHPHDRLESSNTKEALLLDMLNELNRCPRILYDMLPEEERAQFLPALDENSMNNLSENSLNEESRLLWDGSSDWAEALTKRIRHQDRFPYLMLRFIEEMDLLKGIRFRVDLGEIELDSYSKKVGRNGEYDRTITDHALAFGKLSDFQNEEEVSRMISGEASYPVRFSLFAPRYAIYDNKIGYCHTSDPVYPKSKTGEKRALSNPQSMGFISVHDLRKLLLMELLCEGSFSRMQSDFLRKANRILDETAEGKLQFSALFPEMRHRFIPPQNPKSKDRREKAETTLEKYKQEIKGRKDKLNSQLLSAFDMNQRQLPSRLLDEWMNIRPASHSVKLRTYVKQLNEDCRLRLRKFRKDGDGKARAIPLVGEMATFLSQDIVRMIISEETKKLITSAYYNEMQRSLAQYAGEENRRQFRAIVAELHLLDPSSGHPFLSATMETAHRYTEDFYKCYLEKKREWLAKTFYRPEQDENTKRRISVFFVPDGEARKLLPLLIRRRMKEQNDLQDWIRNKQAHPIDLPSHLFDSKIMELLKVKDGKKKWNEAFKDWWSTKYPDGMQPFYGLRRELNIHGKSVSYIPSDGKKFADCYTHLMEKTVRDKKRELRTAGKPVPPDLAAYIKRSFHRAVNEREFMLRLVQEDDRLMLMAINKMMTDREEDILPGLKNIDSILDEENQFSLAVHAKVLEKEGEGGDNSLSLVPATIEIKSKRKDWSKYIRYRYDRRVPGLMSHFPEHKATLDEVKTLLGEYDRCRIKIFDWAFALEGAIMSDRDLKPYLHESSSREGKSGEHSTLVKMLVEKKGCLTPDESQYLILIRNKAAHNQFPCAAEMPLIYRDVSAKVGSIEGSSAKDLPEGSSLVDSLWKKYEMIIRKILPILDHENRFFGKLLNNMSQPINDL

SEQ ID NO: 174 - protein, 1218 aa, Capnocytophaga cynodegmi
MENKTSLGNNIYYNPFKPQDKSYFAGYLNAAMENIDSVFRELGKRLKGKEYTSENFFDAIFKENISLVEYERYVKLLSDYFPMARLLDKKEVPIKERKENFKKNFRGIIKAVRDLRNFYTHKEHGEVEITDEIFGVLDEMLKSTVLTVKKKKIKTDKTKEILKKSIEKQLDILCQKKLEYLKDTARKIEEKRRNQRERGEKKLVPRFEYSDRRDDLIAAIYNDAFDVYIDKKKDSLKESSKTKYNTESYPQQEEGDLKIPISKNGVVFLLSLFLSKQEVHAFKSKIAGFKATVIDEATVSHRKNSICFMATHEIFSHLAYKKLKRKVRTAEINYSEAENAEQLSIYAKETLMMQMLDELSKVPDVVYQNLSEDVQKTFIEDWNEYLKENNGDVGTMEEEQVIHPVIRKRYEDKFNYFAIRFLDEFAQFPTLRFQVHLGNYLHDSRPKEHLISDRRIKEKITVFGRLSELEHKKALFIKNTETNEDRKHYWEVFPNPNYDFPKENISVNDKDFPIAGSILDREKQPTAGKIGIKVNLLNQKYISEVDKAVKAHQLKQRNNKPSIQNIIEEIVPINGSNPKEIIVFGGQPTAYLSMNDIHSILYEFFDKWEKKKEKLEKKGEKELRKEIGKELEEKIVGKIQTQIQQIIDKDINAKILKPYQDDDSTAIDKEKLIKDLKQEQKILQKLKNEQTAREKEYQECIAYQEESRKIKRSDKSRQKYLRNQLKRKYPEVPTRKEILYYQEKGKVAVWLANDIKRFMPTDFKNEWKGEQHSLLQKSLAYYEQCKEELKNLLPQQKVFKHLPFELGGHFQQKYLYQFYTRYLDKRLEHISGLVQQAENFKNENKVFKKVENECFKFLKKQNYTHKGLDAQAQSVLGYPIFLERGFMDEKPTIIKGKTFKGNESLFTDWFRYYKEYQNFQTFYDTENYPLVELEKKQADRKRETKIYQQKKNDVFTLLMAKHIFKSVFKQDSIDRFSLEDLYQSREERLENQEKAKQTGERNTNYIWNKTVDLNLCDGKVTVENVKLKNVGNFIKYEYDQRVQTFLKYEENIKWQAFLIKESKEEENYPYIVEREIEQYEKVRREELLKEVHLIEEYILEKVKDKEILKKGDNQNFKYYILNGLLKQLKNEDVESYKVFNLNTKPEDVNINQLKQEATDLEQKAFVLTYIRNKFAHNQLPKKEFWDYCQEKYGKIEKEKTYAEYFAEVFKREKEALMK

SEQ ID NO: 175 - protein, 1090 aa, Prevotella species
MNIPALVENQKKYFGTYSVMAMLNAQTVLDHIQKVADIEGEQNENNENLWFHPVMSHLYNAKNGYDKQPEKTMFIIERLQSYFPFLKIMAENQREYSNGKYKQNRVEVNSNDIFEVLKRAFGVLKMYRDLTNHYKTYEEKLIDGCEFLTSTEQPLSGMISKYYTVALRNTKERYGYKTEDLAFIQDNIKKITKDAYGKRKSQVNTGFFLSLQDYNGDTQKKLHLSGVGIALLICLFLDKQYINIFLSRLPIFSSYNAQSEERRIIIRSFGINSIKLPKDRIHSEKSNKSVAMDMLNEVKRCPDELFTTLSAEKQSRFRIISDDHNEVLMKRSTDRFVPLLLQYIDYGKLFDHIRFHVNMGKLRYLLKADKTCIDGQTRVRVIEQPLNGFGRLEEAETMRKQENGTFGNSGIRIRDFENVKRDDANPANYPYIVDTYTHYILENNKVEMFISDKGSSAPLLPLIEDDRYVVKTIPSCRMSTLEIPAMAFHMFLFGSKKTEKLIVDVHNRYKRLFQAMQKEEVTAENIASFGIAESDLPQKILDLISGNAHGKDVDAFIRLTVDDMLTDTERRIKRFKDDRKSIRSADNKMGKRGFKQISTGKLADFLAKDIVLFQPSVNDGENKITGLNYRIMQSAIAVYDSGDDYEAKQQFKLMFEKARLIGKGTTEPHPFLYKVFARSIPANAVDFYERYLIERKFYLTGLCNEIKRGNRVDVPFIRRDQNKWKTPAMKTLGRIYSEDLPVELPRQMFDNEIKSHLKSLPQMEGIDFNNANVTYLIAEYMKRVLNDDFQTFYQWKRNYHYMDMLKGEYDRKGSLQHCFTSVEEREGLWKERASRTERYRKLASNKIRSNRQMRNASSEEIETILDKRLSNCRNEYQKSEKVIRRYRVQDALLFLLAKKTLTELADFDGERFKLKEIMPDAEKGILSEIMPMSFTFEKGGKKYTITSEGMKLKNYGDFFVLASDKRIGNLLELVGSDIVSKEDIMEEFNKYDQCRPEISSIVFNLEKWAFDTYPELSARVDREEKVDFKSILKILLNNKNINKEQSDILRKIRNAFDHNNYPDKGIVEIKALPEIAMSIKKAFGEYAIMK

SEQ ID NO: 176 - protein, 1090 aa, Prevotella species
MNIPALVENQKKYFGTYSVMAMLNAQTVLDHIQKVADIEGEQNENNENLWFHPVMSHLYNAKNGYDKQPEKTMFIIERLQSYFPFLKIMAENQREYSNGKYKQNRVEVNSNDIFEVLKRAFGVLKMYRDQASHYKTYDEKLIDGCEFLTSTEQPLSGMINNYYTVALRNMNERYGYKTEDLAFIQDKRFKFVKDAYGKKKSQVNTGFFLSLQDYNGDTQKKLHLSGVGIALLICLFLDKQYINIFLSRLPIFSSYNAQSEERRIIIRSFGINSIKQPKDRIHSEKSNKSVAMDMLNEIKRCPNELFETLSAEKQSRFRIISNDHNEVLMKRSSDRFVPLLLQYIDYGKLFDHIRFHVNMGKLRYLLKADKTCIDGQTRVRVIEQPLNGFGRLEEVETMRKQENGTFGNSGIRIRDFENMKRDDANPANYPYIVDTYTHYILENNKVEMFISDEETPAPLLPVIEDDRYVVKTIPSCRMSTLEIPAMAFHMFLFGSKKTEKLIVDVHNRYKRLFKAMQKEEVTAENIASFGIAESDLPQKIIDLISGNAHGKDVDAFIRLTVDDMLADTERRIKRFKDDRKSIRSADNKMGKRGFKQISTGKLADFLAKDIVLFQPSVNDGENKITGLNYRIMQSAIAVYNSGDDYEAKQQFKLMFEKARLIGKGTTEPHPFLYKVFVRSIPANAVDFYERYLIERKFYLIGLSNEIKKGNRVDVPFIRRDQNKWKTPAMKTLGRIYDEDLPVELPRQMFDNEIKSHLKSLPQMEGIDFNNANVTYLIAEYMKRVLNDDFQTFYQWKRNYRYMDMLRGEYDRKGSLQSCFTSVEEREGLWKERASRTERYRKLASNKIRSNRQMRNASSEEIETILDKRLSNSRNEYQKSEKVIRRYRVQDALLFLLAKKTLTELADFDGERFKLKEIMPDAEKGILSEIMPMSFTFEKGGKKYTITSEGMKLKNYGDFFVLASDKRIGNLLELVGSDTVSKEDIMEEFKKYDQCRPEISSIVFNLEKWAFDTYPELSARVDREEKVDFKSILKILLNNKNINKEQSDILRKIRNAFDHNNYPDKGVVEIRALPEIAMSIKKAFGEYAIMK

SEQ ID NO: 177 - protein, 1090 aa, Prevotella species
MNIPALVENQKKYFGTYSVMAMLNAQTVLDHIQKVADIEGEQNENNENLWFHPVMSHLYNAKNGYDKQPEKTMFIIERLQSYFPFLKIMAENQREYSNGKYKQNRVEVNSNDIFEVLKRAFGVLKMYRDLTNHYKTYEEKLIDGCEFLTSTEQPFSGMISKYYTVALRNTKERYGYKAEDLAFIQDNRYKFTKDAYGKRKSQVNTGSFLSLQDYNGDTTKKLHLSGVGIALLICLFLDKQYINLFLSRLPIFSSYNAQSEERRIIIRSFGINSIKQPKDRIHSEKSNKSVAMDMLNEVKRCPDELFTTLSAEKQSRFRIISDDHNEVLMKRSSDRFVPLLLQYIDYGKLFDHIRFHVNMGKLRYLLKADKTCIDGQTRVRVIEQPLNGFGRLEEVETMRKQENGTFGNSGIRIRDFENMKRDDANPANYPYIVETYTHYILENNKVEMFISDEENPTPLLPVIEDDRYVVKTIPSCRMSTLEIPAMAFHMFLFGSEKTEKLIIDVHDRYKRLFQAMQKEEVTAENIASFGIAESDLPQKIMDLISGNAHGKDVDAFIRLTVDDMLTDTERRIKRFKDDRKSIRSADNKMGKRGFKQISTGKLADFLAKDIVLFQPSVNDGENKITGLNYRIMQSAIAVYDSGDDYEAKQQFKLMFEKARLIGKGTTEPHPFLYKVFVRSIPANAVDFYERYLIERKFYLIGLSNEIKKGNRVDVPFIRRDQNKWKTPAMKTLGRIYSEDLPVELPRQMFDNEIKSHLKSLPQMEGIDFNNANVTYLIAEYMKRVLNDDFQTFYQWKRNYRYMDMLRGEYDRKGSLQHCFTSIEEREGLWKERASRTERYRKLASNKIRSNRQMRNASSEEIETILDKRLSNCRNEYQKSEKIIRRYRVQDALLFLLAKKTLTELADFDGERFKLKEIMPDAEKGILSEIMPMSFTFEKGGKIYTITSGGMKLKNYGDFFVLASDKRIGNLLELVGSNTVSKEDIMEEFKKYDQCRPEISSIVFNLEKWAFDTYPELPARVDRKEKVDFWSILDVLSNNKDINNEQSYILRKIRNAFDHNNYPDKGIVEIKALPEIAMSIKKAFGEYAIMK

SEQ ID NO: 178 - protein, 1131 aa, Phaeodactylibacter xiamenensis
MTNTPKRRTLHRHPSYFGAFLNIARHNAFMIMEHLSTKYDMEDKNTLDEAQLPNAKLFGCLKKRYGKPDVTEGVSRDLRRYFPFLNYPLFLHLEKQQNAEQAATYDINPEDIEFTLKGFFRLLNQMRNNYSHYISNTDYGKFDKLPVQDIYEAAIFRLLDRGKHTKRFDVFESKHTRHLESNNSEYRPRSLANSPDHENTVAFVTCLFLERKYAFPFLSRLDCFRSTNDAAEGDPLIRKASHECYTMFCCRLPQPKLESSDILLDMVNELGRCPSALYNLLSEEDQARFHIKREEITGFEEDPDEELEQEIVLKRHSDRFPYFALRYFDDTEAFQTLRFDVYLGRWRTKPVYKKRIYGQERDRVLTQSIRTFTRLSRLLPIYENVKHDAVRQNEEDGKLVNPDVTSQFHKSWIQIESDDRAFLSDRIEHFSPHYNFGDQVIGLKFINPDRYAAIQNVFPKLPGEEKKDKDAKLVNETADAIISTHEIRSLFLYHYLSKKPISAGDERRFIQVDTETFIKQYIDTIKLFFEDIKSGELQPIADPPNYQKNEPLPYVRGDKEKTQEERAQYRERQKEIKERRKELNTLLQNRYGLSIQYIPSRLREYLLGYKKVPYEKLALQKLRAQRKEVKKRIKDIEKMRTPRVGEQATWLAEDIVFLTPPKMHTPERKTTKHPQKLNNDQFRIMQSSLAYFSVNKKAIKKFFQKETGIGLSNRETSHPFLYRIDVGRCRGILDFYTGYLKYKMDWLDDAIKKVDNRKHGKKEAKKYEKYLPSSIQHKTPLELDYTRLPVYLPRGLFKKAIVKALAAHADFQVEPEEDNVIFCLDQLLDGDTQDFYNWQRYYRSALTEKETDNQLVLAHPYAEQILGTIKTLEGKQKNNKLGNKAKQKIKDELIDLKRAKRRLLDREQYLRAVQAEDRALWLMIQERQKQKAEHEEIAFDQLDLKNITKILTESIDARLRIPDTKVDITDKLPLRRYGDLRRVAKDRRLVNLASYYHVAGLSEIPYDLVKKELEEYDRRRVAFFEHVYQFEKEVYDRYAAELRNENPKGESTYFSHWEYVAVAVKHSADTHFNELFKEKVMQLRNKFHHNEFPYFDWLLPEVEKASAALYADRVFDVAEGYYQKMRKLMRQ

SEQ ID NO: 179 - protein, 1155 aa, Flavobacterium species
MDNNITVEKTELGLGITYNHDKVEDKHYFGGFFNLAQNNIDLVAQEFKKRLLIQGKDSINIFANYFSDQCSITNLERGIKILAEYFPVVSYIDLDEKNKSKSIREHLILLLETINNLRNYYTHYYHKKIIIDGSLFPLLDTILLKVVLEIKKKKLKEDKTKQLLKKGLEKEMTILFNLMKAEQKEKKIKGWNIDENIKGAVLNRAFSHLLYNDELSDYRKSKYNTEDETLKDTLTESGILFLLSFFLNKKEQEQLKANIKGYKGKIASIPDEEITLKNNSLRNMATHWTYSHLTYKGLKHRIKTDHEKETLLVNMVDYLSKVPHEIYQNLSEQNKSLFLEDINEYMRDNEENHDSSEASRVIHPVIRKRYENKFAYFAIRFLDEFAEFPTLRFMVNVGNYIHDNRKKDIGGTSLITNRTIKQQINVFGNLTEIHKKKNDYFEKEENKEKTLEWELFPNPSYHFQKENIPIFIDLEKSKETNDLAKEYAKEKKKIFGSSRKKQQNTAKKNRETIINLVFDKYKTSDRKTVTFEQPTALLSFNELNSFLYAFLVENKTGKELEKIIIEKIANQYQILKNCSSTVDKTNDNIPKSIKKIVNTTTDSFYFEGKKIDIEKLEKDITIEIEKTNEKLETIKENEESAQNYKRNERNTQKRKLYRKYVFFTNEIGIEATWITNDILRFLDNKENWKGYQHSELQKFISQYDNYKKEALGLLESEWNLESDAFFGQNLKRMFQSNSTFETFYKKYLDNRKNTLETYLSAIENLKTMTDVRPKVLKKKWTELFRFFDKKIYLLSTIETKINELITKPINLSRGIFEEKPTFINGKNPNKENNQHLFANWFIYAKKQTILQDFYNLPLEQPKAITNLKKHKYKLERSINNLKIEDIYIKQMVDFLYQKLFEQSFIGSLQDLYTSKEKREIEKGKAKNEQTPDESFIWKKQVEINTHNGRIIAKTKIKDIGKFKNLLTDNKIAHLISYDDRIWDFSLNNDGDITKKLYSINTELESYETIRREKLLKQIQQFEQFLLEQETEYSAERKHPEKFEKDCNPNFKKYIIEGVLNKIIPNHEIEEIEILKSKEDVFKINFSDILILNNDNIKKGYLLIMIRNKFAHNQLIDKNLFNFSLQLYSKNENENFSEYLNKVCQNIIQEFKEKLK

SEQ ID NO: 180 - protein, 1175 aa, Porphyromonas gulae
MTEQSERPYNGTYYTLEDKHFWAAFLNLARHNAYITLTHIDRQLAYSKADITNDQDVLSFKALWKNFDNDLERKSRLRSLILKHFSFLEGAAYGKKLFESKSSGNKSSKNKELTKKEKEELQANALSLDNLKSILFDFLQKLKDFRNYYSHYRHSESSELPLFDGNMLQRLYNVFDVSVQRVKRDHEHNDKVDPHRHFNHLVRKGKKDRYGHNDNPSFKHHFVDSEGMVTEAGLLFFVSLFLEKRDAIWMQKKIRGFKGGTETYQQMTNEVFCRSRISLPKLKLESLRTDDWMLLDMLNELVRCPKPLYDRLREKDRARFRVPVDILPDEDDTDGGGEDPFKNTLVRHQDRFPYFALRYFDLKKVFTSLRFHIDLGTYHFAIYKKMIGEQPEDRHLTRNLYGFGRIQDFAEEHRPEEWKRLVRDLDYFETGDKPYISQTTPHYHIEKGKIGLRFMPEGQHLWPSPEVGTTRTGRSKYAQDKRLTAEAFLSVHELMPMMFYYFLLREKYSEEVSAEKVQGRIKRVIEDVYAIYDAFARDEINTLKELDACLADKGIRRGHLPKQMIAILSQEHKDMEEKIRKKLQEMIADTDHRLDMLDRQTDRKIRIGRKNAGLPKSGVIADWLVRDMMRFQPVAKDTSGKPLNNSKANSTEYRMLQRALALFGGEKKRLTPYFRQMNLTGGNNPHPFLHETRWESHTNILSFYRSYLRARKAFLERIGRSDRMENRPFLLLKEPKTDRQTLVAGWKSEFHLPRGIFTEAVRDCLIEMGYDEVGSYREVGFMAKAVPLYFERACEDRVQPFYDSPFNVGNSLKPKKGRFLSKEERAEEWERGKERFRDLEAWSHSAARRIEDAFAGIEYASPGNKKKIEQLLRDLSLWEAFESKLKVRADKINLAKLKKEILEAQEHPYHDFKSWQKFERELRLVKNQDIITWMMCRDLMEENKVEGLDTGTLYLKDIRPNVQEQGSLNVLNRVKPMRLPVVVYRADSRGHVHKEEAPLATVYIEERDTKLLKQGNFKSFVKDRRLNGLFSFVDTGGLAMEQYPISKLRVEYELAKYQTARVCVFELTLRLEESLLTRYPHLPDESFRKMLESWSDPLLAKWPELHGKVRLLIAVRNAFSHNQYPMYDEAVFSSIRKYDPSSPDAIEERMGLNIAHRLSEEVKQAKETVERIIQV

SEQ ID NO: 181 - protein, 1145 aa, Chryseobacterium species
METQTIGHGIAYDHSKIQDKHFFGGFLNLAENNIKAVLKAFSEKFNVGNVDVKQFADVSLKDNLPDNDFQKRVSFLKMYFPVVDFINIPNNRAKFRSDLTTLFKSVDQLRNFYTHYYHKPLDFDASLFILLDDIFARTAKEVRDQKMKDDKTRQLLSKSLSEELQKGYELQLERLKELNRLGKKVNIHDQLGIKNGVLNNAFNHLIYKDGESFKTKLTYSSALTSFESAENGIEISQSGLLFLLSMFLKRKEIEDLKNRNKGFKAKVVIDEDGKVNGLKFMATHWVFSYLCFKGLKSKLSTEFHEETLLIQIIDELSKVPDELYCAFDKETRDKFIEDINEYVKEGHQDFSLEDAKVIHPVIRKRYENKFNYFAIRFLDEFVKFPSLRFQVHVGNYVHDRRIKNIDGTTFETERVVKDRIKVFGRLSEISSYKAQYLSSVSDKHDETGWEIFPNPSYVFINNNIPIHISVDTSFKKEIADFKKLRRAQVPDELKIRGAEKKRKFEITQMIGSKSVLNQEEPIALLSLNEIPALLYEILINGKEPAEIERIIKDKLNERQDVIKNYNPENWLPASQISRRLRSNKGERIINTDKLLQLVTKELLVTEQKLKIISDNREALKQKKEGKYIRKFIFTNSELGREAIWLADDIKRFMPADVRKEWKGYQHSQLQQSLAFYNSRPKEALAILESSWNLKDEKIIWNEWILKSFTQNKFFDAFYNEYLKGRKKYFAFLSEHIVQYTSNAKNLQKFIKQQMPKDLFEKRHYIIEDLQTEKNKILSKPFIFPRGIFDKKPTFIKGVKVEDSPESFANWYQYGYQKDHQFQKFYDWKRDYSDVFLEHLGKPFINNGDRRTLGMEELKERIIIKQDLKIKKIKIQDLFLRLIAENLFQKVFKYSAKLPLSDFYLTQEERMEKENMAALQNVREEGDKSPNIIKDNFIWSKMIPYKKGQIIENAVKLKDIGKLNVLSLDDKVQTLLSYDDAKPWSKIALENEFSIGENSYEVIRREKLFKEIQQFESEILFRSGWDGINHPAQLEDNRNPKFKMYIVNGILRKSAGLYSQGEDIWFEYNADFNNLDADVLETKSELVQLAFLVTAIRNKFAHNQLPAKEFYFYIRAKYGFADEPSVALVYLNFTKYAINEFKKVMI

SEQ ID NO: 182 - protein, 948 aa, Riemerella anatipestifer
MFFSFHNAQRVIFKHLYKAFDASLRMVKEDYKAHFTVNLTRDFAHLNRKGKNKQDNPDFNRYRFEKDGFFTESGLLFFTNLFLDKRDAYWMLKKVSGFKASHKQREKMTTEVFCRSRILLPKLRLESRYDHNQMLLDMLSELSRCPKLLYEKLSEENKKHFQVEADGFLDEIEEEQNPFKDTLIRHQDRFPYFALRYLDLNESFKSIRFQVDLGTYHYCIYDKKIGDEQEKRHLTRTLLSFGRLQDFTEINRPQEWKALTKDLDYKETSNQPFISKTTPHYHITDNKIGFRLGTSKELYPSLEIKDGANRIAKYPYNSGFVAHAFISVHELLPLMFYQHLTGKSEDLLKETVRHIQRIYKDFEEERINTIEDLEKANQGRLPLGAFPKQMLGLLQNKQPDLSEKAKIKIEKLIAETKLLSHRLNTKLKSSPKLGKRREKLIKTGVLADWLVKDFMRFQPVAYDAQNQPIKSSKANSTEFWFIRRALALYGGEKNRLEGYFKQTNLIGNTNPHPFLNKFNWKACRNLVDFYQQYLEQREKFLEAIKNQPWEPYQYCLLLKIPKENRKNLVKGWEQGGISLPRGLFTEAIRETLSEDLMLSKPIRKEIKKHGRVGFISRAITLYFKEKYQDKHQSFYNLSYKLEAKAPLLKREEHYEYWQQNKPQSPTESQRLELHTSDRWKDYLLYKRWQHLEKKLRLYRNQDVMLWLMTLELTKNHFKELNLNYHQLKLENLAVNVQEADAKLNPLNQTLPMVLPVKVYPATAFGEVQYHKTPIRTVYIREEHTKALKMGNFKALVKDRRLNGLFSFIKEENDTQKHPISQLRLRRELEIYQSLRVDAFKETLSLEEKLLNKHTSLSSLENEFRALLEEWKKEYAASSMVTDEHIAFIASVRNAFCHNQYPFYKEALHAPIPLFTVAQPTTEEKDGLGIAEALLKVLREYCEIVKSQI

SEQ ID NO: 183 - protein, 1175 aa, Porphyromonas gingivalis
MTEQNEKPYNGTYYTLEDKHFWAAFFNLARHNAYITLAHIDRQLAYSKADITNDEDILFFKGQWKNLDNDLERKARLRSLILKHFSFLEGAAYGKKLFESQSSGNKSSKKKELTKKEKEELQANALSLDNLKSILFDFLQKLKDFRNYYSHYRHPESSELPLFDGNMLQRLYNVFDVSVQRVKRDHEHNDKVDPHRHFNHLVRKGKKDKYGNNDNPFFKHHFVDREEKVTEAGLLFFVSLFLEKRDAIWMQKKIRGFKGGTEAYQQMTNEVFCRSRISLPKLKLESLRTDDWMLLDMLNELVRCPKLLYDRLREEDRARFRVPVDILSDEDDTDGTEEDPFKNTLVRHQDRFPYFALRYFDLKKVFTSLRFHIDLGTYHFAIYKKNIGEQPEDRHLTRNLYGFGRIQDFAEEHRPEEWKRLVRDLDYFETGDKPYITQTTPHYHIEKGKIGLRFVPEGQLLWPSPEVGATRTGRSKYAQDKRFTAEAFLSVHELMPMMFYYFLLREKYSEEASAEKVQGRIKRVIEDVYAVYDAFARDEINTRDELDACLADKGIRRGHLPRQMIAILSQEHKDMEEKVRKKLQEMIADTDHRLDMLDRQTDRKIRIGRKNAGLPKSGVIADWLVRDMMRFQPVAKDTSGKPLNNSKANSTEYRMLQRALALFGGEKERLTPYFRQMNLTGGNNPHPFLHETRWESHTNILSFYRSYLKARKAFLQSIGRSDREENHRFLLLKEPKTDRQTLVAGWKSEFHLPRGIFTEAVRDCLIEMGYDEVGSYKEVGFMAKAVPLYFERACKDRVQPFYDYPFNVGNSLKPKKGRFLSKEKRAEEWESGKERFRDLEAWSHSAARRIEDAFVGIEYASWENKKKIEQLLQDLSLWETFESKLKVKADKINIAKLKKEILEAKEHPYHDFKSWQKFERELRLVKNQDIITWMMCRDLMEENKVEGLDTGTLYLKDIRTDVQEQGSLNVLNHVKPMRLPVVVYRADSRGHVHKEEAPLATVYIEERDTKLLKQGNFKSFVKDRRLNGLFSFVDTGALAMEQYPISKLRVEYELAKYQTARVCAFEQTLELEESLLTRYPHLPDESFREMLESWSDPLLDKWPDLQREVRLLIAVRNAFSHNQYPMYDETIFSSIRKYDPSSLDAIEERMGLNIAHRLSEEVKLAKEMVERIIQA

SEQ ID NO: 184 - protein, 1175 aa, Porphyromonas gingivalis
MTEQNEKPYNGTYYTLKDKHFWAAFFNLARHNAYITLTHIDRQLAYSKADITNDEDILFFKGQWKNLDNDLERKARLRSLILKHFSFLEGAAYGKKLFESQSSGNKSSKKKELTKKEKEELQANALSLDNLKSILFDFLQKLKDFRNYYSHYRHPESSELPMFDGNMLQRLYNVFDVSVQRVKRDHEHNDKVDPHRHFNHLVRKGKKDRCGNNDNPFFKHHFVDREGKVTEAGLLFFVSLFLEKRDAIWMQKKIRGFKGGTETYQQMTNEVFCRSRISLPKLKLESLRTDDWMLLDMLNELVRCPKSLYDRLREEDRACFRVPVDILSDEDDTDGAEEDPFKNTLVRHQDRFPYFALRYFDLKKVFTSLRFHIDLGTYHFAIYKKNIGEQPEDRHLTRNLYGFGRIQDFAEEHRPEEWKRLVRDLDCFETGDKPYITQTTPHYHIEKGKIGLRFVPEGQHLWPSPEVGATRTGRSKYAQDKRFTAEAFLSVHELMPMMFYYFLLREKYSEEVSAERVQGRIKRVIEDVYAVYDAFARDEINTRDELDACLADKGIRRGHLPRQMIAILSQKHKDMEEKVRKKLQEMIADTDHRLDMLDRQTDRKIRIGRKNAGLPKSGVIADWLVRDMMRFQPVAKDTSGKPLNNSKANSTEYRMLQRALALFGGEKERLTPYFRQMNLTGGNNPHPFLHETRWESHTNILSFYRSYLKARKAFLQSIGRSDRVENHRFLLLKEPKTDRQTLVAGWKGEFHLPRGIFTEAVRDCLIEMGLDEVGSYKEVGFMAKAVPLYFERACKDRVQPFYDYPFNVGNSLKPKKGRFLSKEKRAEEWESGKERFRDLEAWSHSAARRIEDAFAGIENASRENKKKIEQLLQDLSLWETFESKLKVKADKINIAKLKKEILEAKEHPYLDFKSWQKFERELRLVKNQDIITWMMCRDLMEENKVEGLDTGTLYLKDIRTDVQEQGSLNVLNHVKPMRLPVVVYRADSRGHVHKEQAPLATVYIEERDTKLLKQGNFKSFVKDRRLNGLFSFVDTGALAMEQYPISKLRVEYELAKYQTARVCAFEQTLELEESLLTRYPHLPDENFRKMLESWSDPLLDKWPDLHRKVRLLIAVRNAFSHNQYPMYDEAVFSSIRKYDPSSPDAIEERMGLNIAHRLSEEVKQAKEMAERIIQA

SEQ ID NO: 185 - protein, 1213 aa, Flavobacterium columnare
MSSKNESYNKQKTFNHYKQEDKYFFGGFLNNADDNLRQVGKEFKTRINFNHNNNELASVFKDYFNKEKSVAKREHALNLLSNYFPVLERIQKHTNHNFEQTREIFELLLDTIKKLRDYYTHHYHKPITINPKVYDFLDDTLLDVLITIKKKKVKNDTSRELLKEKFRPELTQLKNQKREELIKKGKKLLEENLENAVFNHCLRPFLEENKTDDKQNKTVSLRKYRKSKPNEETSITLTQSGLVFLISFFLHRKEFQVFTSGLEGFKAKVNTIKEEEISLNKNNIVYMITHWSYSYYNFKGLKHRIKTDQGVSTLEQNNTTHSLTNTNTKEALLTQIVDYLSKVPNEIYETLSEKQQKEFEEDINEYMRENPENEDSTFSSIVSHKVIRKRYENKFNYFAMRFLDEYAELPTLRFMVNFGDYIKDRQKKILESIQFDSERIIKKEIHLFEKLGLVTEYKKNVYLKETSNIDLSRFPLFPSPSYVMANNNIPFYIDSRSNNLDEYLNQKKKAQSQNRKRNLTFEKYNKEQSKDAIIAMLQKEIGVKDLQQRSTIGLLSCNELPSMLYEVIVKDIKGAELENKIAQKIREQYQSIRDFTLDSPQKDNIPTTLTKTISTDTSVTFENQPIDIPRLKNALQKELTLTQEKLLNVKQHEIEVDNYNRNKNTYKFKNQPKDKVDDNKLQRKYVFYRNEIGQEANWLASDLIHFMKNKSLWKGYMHNELQSFLAFFEDKKNDCIALLETVFNLKEDCILTKDLKNLFLKHGNFIDFYKEYLKLKEDFLNTESTFLENGFIGLPPKILKKELSKRLNYIFIVFQKRQFIIKELEEKKNNLYADAINLSRGIFDEKPTMIPFKKPNPDEFASWFVASYQYNNYQSFYELTPDKIENDKKKKYKNLRAINKVKIQDYYLKLMVDTLYQDLFNQPLDKSLSDFYVSKTDREKIKADAKAYQKRNDSFLWNKVIHLSLQNNRITANPKLKDIGKYKRALQDEKIATLLTYDDRTWTYALQKPEKENENDYKELHYTALNMELQEYEKVRSKKLLKQVQELEKQILDKFYDFSNNATHPEDLEIEDKKGKRHPNFKLYITKALLKNESEIINLENIDIEILIKYYDYNTEKLKEKIKNMDEDEKAKIVNTKENYNKITNVLIKKALVLIIIRNKMAHNQYPPKFIYDLATRFVPKKEEEYFACYFNRVFETITTELWENKKKAKEIV

SEQ ID NO: 186 - protein, 1119 aa, Porphyromonas gingivalis
MTEQNERPYNGTYYTLEDKHFWAAFFNLARHNAYITLTHIDRQLAYSKADITNDEDILFFKGQWKNLDNDLERKARLRSLILKHFSFLEGAAYGKKLFENKSSGNKSSKKKELTKKEKEELQANALSLDNLKSILFDFLQKLKDFRNYYSHYRHPESSELPLFDGNMLQRLYNVFDVSVQRVKRDHEHNDKVDPHRHFNHLVRKGKKDRCGNNDNPFFKHHFVDREGKVTEAGLLFFVSLFLEKRDAIWMQKKIRGFKGGTEAYQQMTNEVFCRSRISLPKLKLESLRTDDWMLLDMLNELVRCPKSLYDRLREEDRARFRVPVDILSDEDDTDGTEEDPFKNTLVRHQDRFPYFALRYFDLKKVFTSLRFHIDLGTYHFAIYKKNIGEQPEDRHLTRNLYGFGRIQDFAEEHRPEEWKRLVRDLDYFETGDKPYITQTTPHYHIEKGKIGLRFVPEGQHLWPSPEVGATRTGRSKYAQDKRLTAEAFLSVHELMPMMFYYFLLREKYSEEVSAEKVQGRIKRVIEDVYAVYDAFARGEIDTLDRLDACLADKGIRRGHLPRQMIAILSQEHKDMEEKVRKKLQEMIADTDHRLDMLDRQTDRKIRIGRKNAGLPKSGVIADWLVRDMMRFQPVAKDTSGKPLNNSKANSTEYRMLQRALALFGGEKERLTPYFRQMNLTGGNNPHPFLHETRWESHTNILSFYRSYLKARKAFLQSIGRSDREENHRFLLLKEPKTDRQTLVAGWKSEFHLPRGIFTEAVRDCLIEMGYDEVGSYKEVGFMAKAVPLYFERACKDRVQPFYDYPFNVGNSLKPKKGRFLSKEKRAEEWESGKERFRLAKLKKEILEAKEHPYLDFKSWQKFERELRLVKNQDIITWMMCRDLMEENKVEGLDTGTLYLKDIRTEVQEQGSLNVLNRVKPMRLPVVVYRADSRGHVHKEQAPLATVYIEERDTKLLKQGNFKSFVKDRRLNGLFSFVDTGGLAMEQYPISKLRVEYELAKYQTARVCAFEQTLELEESLLTRCPHLPDKNFRKMLESWSDPLLDKWPDLQREVWLLIAVRNAFSHNQYPMYDEAVFSSIRKYDPSSPDAIEERMGLNIAHRLSEEVKQAKEMAERIIQA

SEQ ID NO: 187 - protein, 1135 aa, Porphyromonas gingivalis
MNTVPASENKGQSRTVEDDPQYFGLYLNLARENLIEVESHVRIKFGKKKLNEESLKQSLLCDHLLSVDRWTKVYGHSRRYLPFLHYFDPDSQIEKDHDSKTGVDPDSAQRLIRELYSLLDFLRNDFSHNRLDGTTFEHLEVSPDISSFITGTYSLACGRAQSRFADFFKPDDFVLAKNRKEQLISVADGKECLTVSGLAFFICLFLDREQASGMLSRIRGFKRTDENWARAVHETFCDLCIRHPHDRLESSNTKEALLLDMLNELNRCPRILYDMLPEEERAQFLPALDENSMNNLSENSLNEESRLLWDGSSDWAEALTKRIRHQDRFPYLMLRFIEEMDLLKGIRFRVDLGEIELDSYSKKVGRNGEYDRTITDHALAFGKLSDFQNEEEVSRMISGEASYPVRFSLFAPRYAIYDNKIGYCHTSDPVYPKSKTGEKRALSNPQSMGFISVHDLRKLLLMELLCEGSFSRMQSGFLRKANRILDETAEGKLQFSALFPEMRHRFIPPQNPKSKDRREKAETTLEKYKQEIKGRKDKLNSQLLSAFDMNQRQLPSRLLDEWMNIRPASHSVKLRTYVKQLNEDCRLRLRKFRKDGDGKARAIPLVGEMATFLSQDIVRMIISEETKKLITSAYYNEMQRSLAQYAGEENRRQFRAIVAELHLLDPSSGHPFLSATMETAHRYTEDFYKCYLEKKREWLAKTFYRPEQDENTKRRISVFFVPDGEARKLLPLLIRRRMKEQNDLQDWIRNKQAHPIDLPSHLFDSKIMELLKVKDGKKKWNEAFKDWWSTKYPDGMQPFYGLRRELNIHGKSVSYIPSDGKKFADCYTHLMEKTVQDKKRELRTAGKPVPPDLAADIKRSFHRAVNEREFMLRLVQEDDRLMLMAINKMMTDREEDILPGLKNIDSILDKENQFSLAVHAKVLEKEGEGGDNSLSLVPATIEIKSKRKDWSKYIRYRYDRRVPGLMSHFPEHKATLDEVKTLLGEYDRCRIKIFDWAFALEGAIMSDRDLKPYLHESSSREGKSGEHSTLVKMLVEKKGCLTPDESQYLILIRNKAAHNQFPCAAEMPLIYRDVSAKVGSIEGSSAKDLPEGSSLVDSLWKKYEMIIRKILPILDPENRFFGKLLNNMSQPINDL

SEQ ID NO: 188 - protein, 950 aa, Riemerella anatipestifer
MFFSFHNAQRVIFKHLYKAFDASLRMVKEDYKAHFTVNLTRDFAHLNRKGKNKQDNPDFNRYRFEKDGFFTESGLLFFTNLFLDKRDAYWMLKKVSGFKASHKQSEKMTTEVFCRSRILLPKLRLESRYDHNQMLLDMLSELSRCPKLLYEKLSEKDKKCFQVEADGFLDEIEEEQNPFKDTLIRHQDRFPYFALRYLDLNESFKSIRFQVDLGTYHYCIYDKKIGYEQEKRHLTRTLLNFGRLQDFTEINRPQEWKALTKDLDYNETSNQPFISKTTPHYHITDNKIGFRLRTSKELYPSLEVKDGANRIAKYPYNSDFVAHAFISISVHELLPLMFYQHLTGKSEDLLKETVRHIQRIYKDFEEERINTIEDLEKANQGRLPLGAFPKQMLGLLQNKQPDLSEKAKIKIEKLIAETKLLSHRLNTKLKSSPKLGKRREKLIKTGVLADWLVKDFMRFQPVVYDAQNQPIKSSKANSTESRLIRRALALYGGEKNRLEGYFKQTNLIGNTNPHPFLNKFNWKACRNLVDFYQQYLEQREKFLEAIKHQPWEPYQYCLLLKVPKENRKNLVKGWEQGGISLPRGLFTEAIRETLSKDLTLSKPIRKEIKKHGRVGFISRAITLYFKEKYQDKHQSFYNLSYKLEAKAPLLKKEEHYEYWQQNKPQSPTESQRLELHTSDRWKDYLLYKRWQHLEKKLRLYRNQDIMLWLMTLELTKNHFKELNLNYHQLKLENLAVNVQEADAKLNPLNQTLPMVLPVKVYPTTAFGEVQYHETPIRTVYIREEQTKALKMGNFKALVKDRHLNGLFSFIKEENDTQKHPISQLRLRRELEIYQSLRVDAFKETLSLEEKLLNKHASLSSLENEFRTLLEEWKKKYAASSMVTDKHIAFIASVRNAFCHNQYPFYKETLHAPILLFTVAQPTTEEKDGLGIAEALLRVLREYCEIVKSQI

SEQ ID NO: 189 - protein, 1213 aa, Flavobacterium columnare
MSSKNESYNKQKTFNHYKQEDKYFFGGFLNNADDNLRQVGKEFKTRINFNHNNNELASVFKDYFNKEKSVAKREHALNLLSNYFPVLERIQKHTNHNFEQTREIFELLLDTIKKLRDYYTHHYHKPITINPKIYDFLDDTLLDVLITIKKKKVKNDTSRELLKEKLRPELTQLKNQKREELIKKGKKLLEENLENAVFNHCLRPFLEENKTDDKQNKTVSLRKYRKSKPNEETSITLTQSGLVFLMSFFLHRKEFQVFTSGLEGFKAKVNTIKEEKISLNKNNIVYMITHWSYSYYNFKGLKHRIKTDQGVSTLEQNNTTHSLTNTNTKEALLTQIVDYLSKVPNEIYETLSEKQQKEFEEDINEYMRENPENEDSTFSSIVSHKVIRKRYENKFNYFAMRFLDEYAELPTLRFMVNFGDYIKDRQKKILESIQFDSERIIKKEIHLFEKLGLVTEYKKNVYLKETSNIDLSRFPLFPSPSYVMANNNIPFYIDSRSNNLDEYLNQKKKAQSQNRKRNLTFEKYNKEQSKDAIIAMLQKEIGVKDLQQRSTIGLLSCNELPSMLYEVIVKDIKGAELENKIAQKIREQYQSIRDFTLNSPQKDNIPTTLIKTISTDTSVTFENQPIDIPRLKNAIQKELALTQEKLLNVKQHEIEVNNYNRNKNTYKFKNQPKDKVDDNKLQRKYVFYRNEIGQEANWLASDLIHFMKNKSLWKGYMHNELQSFLAFFEDKKNDCIALLETVFNLKEDCILTKDLKNLFLKHGNFIDFYKEYLKLKEDFLNTESTFLENGFIGLPPKILKKELSKRLNYIFIVFQKRQFIIKELEEKKNNLYADAINLSRGIFDEKPTMIPFKKPNPDEFASWFVASYQYNNYQSFYELTPDKIENDKKKKYKNLRAINKVKIQDYYLKLMVDTLYQDLFNQPLDKSLSDFYVSKTDREKIKADAKAYQKRNDSFLWNKVIHLSLQNNRITANPKLKDIGKYKRALQDEKIATLLTYDDRTWTYALQKPEKENENDYKELHYTALNMELQEYEKVRSKKLLKQVQELEKQILDKFYDFSNNATHPEDLEIEDKKGKRHPNFKLYITKALLKNESEIINLENIDIEILIKYYDYNTEKLKEKIKNMDEDEKAKIVNTKENYNKITNVLIKKALVLIIIRNKMAHNQYPPKFIYDLATRFVPKKEEEYFACYFNRVFETITTELWENKKKAKEIV

SEQ ID NO: 190 - protein, 1095 aa, Riemerella anatipestifer
MEKPLPPNVYTLKHKFFWGAFLNIARHNAFITICHINEQLGLTTPPNDDKIADVVCGTWNNILNNDHDLLKKSQLTELILKHFPFLAAMCYHPPKKEGKKKGSQKEQQKEKENEAQSQAEALNPSELIKVLKTLVKQLRTLRNYYSHHSHKKPDAEKDIFKHLYKAFDASLRMVKEDYKAHFTVNLTQDFAHLNRKGKNKQDNPDFDRYRFEKDGFFTESGLLFFTNLFLDKRDAYWMLKKVSGFKASHKQSEKMTTEVFCRSRILLPKLRLESRYDHNQMLLDMLSELSRYPKLLYEKLSEEDKKRFQVEADGFLDEIEEEQNPFKDTLIRHQDRFPYFALRYLDLNESFKSIRFQVDLGTYHYCIYDKKIGDEQEKRHLTRTLLSFGRLQDFTEINRPQEWKALTKDLDYKETSKQPFISKTTPHYHITDNKIGFRLGTSKELYPSLEVKDGANRIAQYPYNSDFVAHAFISVHELLPLMFYQHLTGKSEDLLKETVRHIQRIYKDFEEERINTIEDLEKANQGRLPLGAFPKQMLGLLQNKQPDLSEKAKIKIEKLIAETKLLSHRLNTKLKSSPKLGKRREKLIKTGVLADWLVKDFMRFQPVAYDAQNQPIESSKANSTEFQLIQRALALYGGEKNRLEGYFKQTNLIGNTNPHPFLNKFNWKACRNLVDFYQQYLEQREKFLEAIKNQPWEPYQYCLLLKIPKENRKNLVKGWEQGGISLPRGLFTEAIRETLSKDLTLSKPIRKEIKKHGRVGFISRAITLYFREKYQDDHQSFYDLPYKLEAKASPLPKKEHYEYWQQNKPQSPTELQRLELHTSDRWKDYLLYKRWQHLEKKLRLYRNQDVMLWLMTLELTKNHFKELNLNYHQLKLENLAVNVQEADAKLNPLNQTLPMVLPVKVYPATAFGEVQYQETPIRTVYIREEQTKALKMGNFKALVKDRRLNGLFSFIKEENDTQKHPISQLRLRRELEIYQSLRVDAFKETLNLEEKLLKKHTSLSSVENKFRILLEEWKKEYAASSMVTDEHIAFIASVRNAFCHNQYPFYEEALHAPIPLFTVAQQTTEEKDGLGIAEALLRVLREYCEIVKSQI

SEQ ID NO: 191 - protein, 1149 aa, Sinomicrobium oceani
MESTTTLGLHLKYQHDLFEDKHYFGGGVNLAVQNIESIFQAFAERYGIQNPLRKNGVPAINNIFHDNISISNYKEYLKFLKQYLPVVGFLEKSNEINIFEFREDFEILINAIYKLRHFYTHYYHSPIKLEDRFYTCLNELFVAVAIQVKKHKMKSDKTRQLLNKNLHQLLQQLIEQKREKLKDKKAEGEKVSLDTKSIENAVLNDAFVHLLDKDENIRLNYSSRLSEDIITKNGITLSISGLLFLLSLFLQRKEAEDLRSRIEGFKGKGNELRFMATHWVFSYLNVKRIKHRLNTDFQKETLLIQIADELSKVPDEVYKTLDHENRSKFLEDINEYIREGNEDASLNESTVVHGVIRKRYENKFHYLVLRYLDEFVDFPSLRFQVHLGNYIHDRRDKVIDGTNFITNRVIKEPIKVFGKLSHVSKLKSDYMESLSREHKNGWDVFPNPSYNFVGHNIPIFINLRSASSKGKELYRDLMKIKSEKKKKSREEGIPMERRDGKPTKIEISNQIDRNIKDNNFKDIYPGEPLAMLSLNELPALLFELLRRPSITPQDIEDRMVEKLYERFQIIRDYKPGDGLSTSKISKKLRKADNSTRLDGKKLLRAIQTETRNAREKLHTLEENKALQKNRKRRTVYTTREQGREASWLAQDLKRFMPIASRKEWRGYHHSQLQQILAFYDQNPKQPLELLEQFWDLKEDTYVWNSWIHKSLSQHNGFVPMYEGYLKGRLGYYKKLESDIIGFLEEHKVLKRYYTQQHLNVIFRERLYFIKTETKQKLELLARPLVFPRGIFDDKPTFVQDKKVVDHPELFADWYVYSYKDDHSFQEFYHYKRDYNEIFETELSWDIDFKDNKRQLNPSEQMDLFRMKWDLKIKKIKIQDIFLKIVAEDIYLKIFGHKIPLSLSDFYISRQERLTLDEQAVAQSMRLPGDTSENQIKESNLWQTTVPYEKEQIREPKIKLKDIGKFKYFLQQQKVLNLLKYDPQHVWTKAELEEELYIGKHSYEVVRREMLLQKCHQLEKHILEQFRFDGSNHPRELEQGNHPNFKMYIVNGILTKRGELEIEAENWWLELGNSKNSLDKVEVELLTMKTIPEQKAFLLILIRNKFAHNQLPADNYFHYASNLMNLKKSDTYSLFWFTVADTIVQEFMSL

SEQ ID NO: 192 - protein, 1133 aa, Reichenbachiella agariperforans
MKTNPLIASSGEKPNYKKFNTESDKSFKKIFQNKGSIAPIAEKACKNFEIKSKSPVNRDGRLHYFSVGHAFKNIDSKNVFRYELDESQMDMKPTQFLALQKEFFDFQGALNGLLKHIRNVNSHYVHTFEKLEIQSINQKLITFLIEAFELAVIHSYLNEEELSYEAYKDDPQSGQKLVQFLCDKFYPNKEHEVEERKTILAKNKRQALEHLLFIEVTSDIDWKLFEKHKVFTISNGKYLSFHACLFLLSLFLYKSEANQLISKIKGFKRNDDNQYRSKRQIFTFFSKKFTSQDVNSEEQHLVKFRDVIQYLNHYPSAWNKHLELKSGYPQMTDKLMRYIVEAEIYRSFPDQTDNHRFLLFAIREFFGQSCLDTWTGNTPINFSNQEQKGFSYEINTSAEIKDIETKLKALVLKGPLNFKEKKEQNRLEKDLRREKKEQPTNRVKEKLLTRIQHNMLYVSYGRNQDRFMDFAARFLAETDYFGKDAKFKMYQFYTSDEQRDHLKEQKKELPKKEFEKLKYHQSKLVDYFTYAEQQARYPDWDTPFVVENNAIQIKVTLFNGAKKIVSVQRNLMLYLLEDALYSEKRENAGKGLISGYFVHHQKELKDQLDILEKETEISREQKREFKKLLPKRLLHRYSPAQINDTTEWNPMEVILEEAKAQEQRYQLLLEKAILHQTEEDFLKRNKGKQFKLRFVRKAWHLMYLKELYMNKVAEHGHHKSFHITKEEFNDFCRWMFAFDEVPKYKEYLCDYFSQKGFFNNAEFKDLIESSTSLNDLYEKTKQRFEGWSKDLTKQSDENKYLLANYESMLKDDMLYVNISHFISYLESKGKINRNAHGHIAYKALNNVPHLIEEYYYKDRLAPEEYKSHGKLYNKLKTVKLEDALLYEMAMHYLSLEPALVPKVKTKVKDILSSNIAFDIKDAAGHHLYHLLIPFHKIDSFVALINHQSQQEKDPDKTSFLAKIQPYLEKVKNSKDLKAVYHYYKDTPHTLRYEDLNMIHSHIVSQSVQFTKVALKLEEYFIAKKSITLQIARQISYSEIADLSNYFTDEVRNTAFHFDVPETAYSMILQGIESEFLDREIKPQKPKSLSELSTQQVSVCTAFLETLHNNLFDRKDDKKERLSKARERYFEQIN

SEQ ID NO: 193 - protein, 1340 aa, Lachnospiraceae bacterium
MQISKVNHKHVAVGQKDRERITGFIYNDPVGDEKSLEDVVAKRANDTKVLFNVFNTKDLYDSQESDKSEKDKEIISKGAKFVAKSFNSAITILKKQNKIYSTLTSQQVIKELKDKFGGARIYDDDIEEALTETLKKSFRKENVRNSIKVLIENAAGIRSSLSKDEEELIQEYFVKQLVEEYTKTKLQKNVVKSIKNQNMVIQPDSDSQVLSLSESRREKQSSAVSSDTLVNCKEKDVLKAFLTDYAVLDEDERNSLLWKLRNLVNLYFYGSESIRDYSYTKEKSVWKEHDEQKANKTLFIDEICHITKIGKNGKEQKVLDYEENRSRCRKQNINYYRSALNYAKNNTSGIFENEDSNHFWIHLIENEVERLYNGIENGEEFKFETGYISEKVWKAVINHLSIKYIALGKAVYNYAMKELSSPGDIEPGKIDDSYINGITSFDYEIIKAEESLQRDISMNVVFATNYLACATVDTDKDFLLFSKEDIRSCTKKDGNLCKNIMQFWGGYSTWKNFCEEYLKDDKDALELLYSLKSMLYSMRNSSFHFSTENVDNGSWDTELIGKLFEEDCNRAARIEKEKFYNNNLHMFYSSSLLEKVLERLYSSHHERASQVPSFNRVFVRKNFPSSLSEQRITPKFTDSKDEQIWQSAVYYLCKEIYYNDFLQSKEAYKLFREGVKNLDKNDINNQKAADSFKQAVVYYGKAIGNATLSQVCQAIMTEYNRQNNDGLKKKSAYAEKQNSNKYKHYPLFLKQVLQSAFWEYLDENKEIYGFISAQIHKSNVEIKAEDFIANYSSQQYKKLVDKVKKTPELQKWYTLGRLINPRQANQFLGSIRNYVQFVKDIQRRAKENGNPIRNYYEVLESDSIIKILEMCTKLNGTTSNDIHDYFRDEDEYAEYISQFVNFGDVHSGAALNAFCNSESEGKKNGIYYDGINPIVNRNWVLCKLYGSPDLISKIISRVNENMIHDFHKQEDLIREYQIKGICSNKKEQQDLRTFQVLKNRVELRDIVEYSEIINELYGQLIKWCYLRERDLMYFQLGFHYLCLNNASSKEADYIKINVDDRNISGAILYQIAAMYINGLPVYYKKDDMYVALKSGKKASDELNSNEQTSKKINYFLKYGNNILGDKKDQLYLAGLELFENVAEHENIIIFRNEIDHFHYFYDRDRSMLDLYSEVFDRFFTYDMKLRKNVVNMLYNILLDHNIVSSFVFETGEKKVGRGDSEVIKPSAKIRLRANNGVSSDVFTYKVGSKDELKIATLPAKNEEFLLNVARLIYYPDMEAVSENMVREGVVKVEKSNDKKGKISRGSNTRSSNQSKYNNKSKNRMNYSMGSIFEKMDLKFD

SEQ ID NO: 194 - protein, 1437 aa, Lachnospiraceae bacterium
MKISKVREENRGAKLTVNAKTAVVSENRSQEGILYNDPSRYGKSRKNDEDRDRYIESRLKSSGKLYRIFNEDKNKRETDELQWFLSEIVKKINRRNGLVLSDMLSVDDRAFEKAFEKYAELSYTNRRNKVSGSPAFETCGVDAATAERLKGIISETNFINRIKNNIDNKVSEDIIDRIIAKYLKKSLCRERVKRGLKKLLMNAFDLPYSDPDIDVQRDFIDYVLEDFYHVRAKSQVSRSIKNMNMPVQPEGDGKFAITVSKGGTESGNKRSAEKEAFKKFLSDYASLDERVRDDMLRRMRRLVVLYFYGSDDSKLSDVNEKFDVWEDHAARRVDNREFIKLPLENKLANGKTDKDAERIRKNTVKELYRNQNIGCYRQAVKAVEEDNNGRYFDDKMLNMFFIHRIEYGVEKIYANLKQVTEFKARTGYLSEKIWKDLINYISIKYIAMGKAVYNYAMDELNASDKKEIELGKISEEYLSGISSFDYELIKAEEMLQRETAVYVAFAARHLSSQTVELDSENSDFLLLKPKGTMDKNDKNKLASNNILNFLKDKETLRDTILQYFGGHSLWTDFPFDKYLAGGKDDVDFLTDLKDVIYSMRNDSFHYATENHNNGKWNKELISAMFEHETERMTVVMKDKFYSNNLPMFYKNDDLKKLLIDLYKDNVERASQVPSFNKVFVRKNFPALVRDKDNLGIELDLKADADKGENELKFYNALYYMFKEIYYNAFLNDKNVRERFITKATKVADNYDRNKERNLKDRIKSAGSDEKKKLREQLQNYIAENDFGQRIKNIVQVNPDYTLAQICQLIMTEYNQQNNGCMQKKSAARKDINKDSYQHYKMLLLVNLRKAFLEFIKENYAFVLKPYKHDLCDKADFVPDFAKYVKPYAGLISRVAGSSELQKWYIVSRFLSPAQANHMLGFLHSYKQYVWDIYRRASETGTEINHSIAEDKIAGVDITDVDAVIDLSVKLCGTISSEISDYFKDDEVYAEYISSYLDFEYDGGNYKDSLNRFCNSDAVNDQKVALYYDGEHPKLNRNIILSKLYGERRFLEKITDRVSRSDIVEYYKLKKETSQYQTKGIFDSEDEQKNIKKFQEMKNIVEFRDLMDYSEIADELQGQLINWIYLRERDLMNFQLGYHYACLNNDSNKQATYVTLDYQGKKNRKINGAILYQICAMYINGLPLYYVDKDSSEWTVSDGKESTGAKIGEFYRYAKSFENTSDCYASGLEIFENISEHDNITELRNYIEHFRYYSSFDRSFLGIYSEVFDRFFTYDLKYRKNVPTILYNILLQHFVNVRFEFVSGKKMIGIDKKDRKIAKEKECARITIREKNGVYSEQFTYKLKNGTVYVDARDKRYLQSIIRLLFYPEKVNMDEMIEVKEKKKPSDNNTGKGYSKRDRQQDRKEYDKYKEKKKKEGNFLSGMGGNINWDEINAQLKN

SEQ ID NO: 195 - protein, 1385 aa, Clostridium aminophilum
MKFSKVDHTRSAVGIQKATDSVHGMLYTDPKKQEVNDLDKRFDQLNVKAKRLYNVFNQSKAEEDDDEKRFGKVVKKLNRELKDLLFHREVSRYNSIGNAKYNYYGIKSNPEEIVSNLGMVESLKGERDPQKVISKLLLYYLRKGLKPGTDGLRMILEASCGLRKLSGDEKELKVFLQTLDEDFEKKTFKKNLIRSIENQNMAVQPSNEGDPIIGITQGRFNSQKNEEKSAIERMMSMYADLNEDHREDVLRKLRRLNVLYFNVDTEKTEEPTLPGEVDTNPVFEVWHDHEKGKENDRQFATFAKILTEDRETRKKEKLAVKEALNDLKSAIRDHNIMAYRCSIKVTEQDKDGLFFEDQRINRFWIHHIESAVERILASINPEKLYKLRIGYLGEKVWKDLLNYLSIKYIAVGKAVFHFAMEDLGKTGQDIELGKLSNSVSGGLTSFDYEQIRADETLQRQLSVEVAFAANNLFRAVVGQTGKKIEQSKSEENEEDFLLWKAEKIAESIKKEGEGNTLKSILQFFGGASSWDLNHFCAAYGNESSALGYETKFADDLRKAIYSLRNETFHFTTLNKGSFDWNAKLIGDMFSHEAATGIAVERTRFYSNNLPMFYRESDLKRIMDHLYNTYHPRASQVPSFNSVFVRKNFRLFLSNTLNTNTSFDTEVYQKWESGVYYLFKEIYYNSFLPSGDAHHLFFEGLRRIRKEADNLPIVGKEAKKRNAVQDFGRRCDELKNLSLSAICQMIMTEYNEQNNGNRKVKSTREDKRKPDIFQHYKMLLLRTLQEAFAIYIRREEFKFIFDLPKTLYVMKPVEEFLPNWKSGMFDSLVERVKQSPDLQRWYVLCKFLNGRLLNQLSGVIRSYIQFAGDIQRRAKANHNRLYMDNTQRVEYYSNVLEVVDFCIKGTSRFSNVFSDYFRDEDAYADYLDNYLQFKDEKIAEVSSFAALKTFCNEEEVKAGIYMDGENPVMQRNIVMAKLFGPDEVLKNVVPKVTREEIEEYYQLEKQIAPYRQNGYCKSEEDQKKLLRFQRIKNRVEFQTITEFSEIINELLGQLISWSFLRERDLLYFQLGFHYLCLHNDTEKPAEYKEISREDGTVIRNAILHQVAAMYVGGLPVYTLADKKLAAFEKGEADCKLSISKDTAGAGKKIKDFFRYSKYVLIKDRMLTDQNQKYTIYLAGLELFENTDEHDNITDVRKYVDHFKYYATSDENAMSILDLYSEIHDRFFTYDMKYQKNVANMLENILLRHFVLIRPEFFTGSKKVGEGKKITCKARAQIEIAENGMRSEDFTYKLSDGKKNISTCMIAARDQKYLNTVARLLYYPHEAKKSIVDTREKKNNKKTNRGDGTFNKQKGTARKEKDNGPREFNDTGFSNTPFAGFDPFRNS

SEQ ID NO: 196 - protein, 1175 aa, Carnobacterium gallinarum
MRITKVKIKLDNKLYQVTMQKEEKYGTLKLNEESRKSTAEILRLKKASFNKSFHSKTINSQKENKNATIKKNGDYISQIFEKLVGVDTNKNIRKPKMSLTDLKDLPKKDLALFIKRKFKNDDIVEIKNLDLISLFYNALQKVPGEHFTDESWADFCQEMMPYREYKNKFIERKIILLANSIEQNKGFSINPETFSKRKRVLHQWAIEVQERGDFSILDEKLSKLAEIYNFKKMCKRVQDELNDLEKSMKKGKNPEKEKEAYKKQKNFKIKTIWKDYPYKTHIGLIEKIKENEELNQFNIEIGKYFEHYFPIKKERCTEDEPYYLNSETIATTVNYQLKNALISYLMQIGKYKQFGLENQVLDSKKLQEIGIYEGFQTKFMDACVFATSSLKNIIEPMRSGDILGKREFKEAIATSSFVNYHHFFPYFPFELKGMKDRESELIPFGEQTEAKQMQNIWALRGSVQQIRNEIFHSFDKNQKFNLPQLDKSNFEFDASENSTGKSQSYIETDYKFLFEAEKNQLEQFFIERIKSSGALEYYPLKSLEKLFAKKEMKFSLGSQVVAFAPSYKKLVKKGHSYQTATEGTANYLGLSYYNRYELKEESFQAQYYLLKLIYQYVFLPNFSQGNSPAFRETVKAILRINKDEARKKMKKNKKFLRKYAFEQVREMEFKETPDQYMSYLQSEMREEKVRKAEKNDKGFEKNITMNFEKLLMQIFVKGFDVFLTTFAGKELLLSSEEKVIKETEISLSKKINEREKTLKASIQVEHQLVATNSAISYWLFCKLLDSRHLNELRNEMIKFKQSRIKFNHTQHAELIQNLLPIVELTILSNDYDEKNDSQNVDVSAYFEDKSLYETAPYVQTDDRTRVSFRPILKLEKYHTKSLIEALLKDNPQFRVAATDIQEWMHKREEIGELVEKRKNLHTEWAEGQQTLGAEKREEYRDYCKKIDRFNWKANKVTLTYLSQLHYLITDLLGRMVGFSALFERDLVYFSRSFSELGGETYHISDYKNLSGVLRLNAEVKPIKIKNIKVIDNEENPYKGNEPEVKPFLDRLHAYLENVIGIKAVHGKIRNQTAHLSVLQLELSMIESMNNLRDLMAYDRKLKNAVTKSMIKILDKHGMILKLKIDENHKNFEIESLIPKEIIHLKDKAIKTNQVSEEYCQLVLALLTTNPGNQLN

SEQ ID NO: 197 - protein, 1164 aa, Carnobacterium gallinarum
MRMTKVKINGSPVSMNRSKLNGHLVWNGTTNTVNILTKKEQSFAASFLNKTLVKADQVKGYKVLAENIFIIFEQLEKSNSEKPSVYLNNIRRLKEAGLKRFFKSKYHEEIKYTSEKNQSVPTKLNLIPLFFNAVDRIQEDKFDEKNWSYFCKEMSPYLDYKKSYLNRKKEILANSIQQNRGFSMPTAEEPNLLSKRKQLFQQWAMKFQESPLIQQNNFAVEQFNKEFANKINELAAVYNVDELCTAITEKLMNFDKDKSNKTRNFEIKKLWKQHPHNKDKALIKLFNQEGNEALNQFNIELGKYFEHYFPKTGKKESAESYYLNPQTIIKTVGYQLRNAFVQYLLQVGKLHQYNKGVLDSQTLQEIGMYEGFQTKFMDACVFASSSLRNIIQATTNEDILTREKFKKELEKNVELKHDLFFKTEIVEERDENPAKKIAMTPNELDLWAIRGAVQRVRNQIFHQQINKRHEPNQLKVGSFENGDLGNVSYQKTIYQKLFDAEIKDIEIYFAEKIKSSGALEQYSMKDLEKLFSNKELTLSLGGQVVAFAPSYKKLYKQGYFYQNEKTIELEQFTDYDFSNDVFKANYYLIKLIYHYVFLPQFSQANNKLFKDTVHYVIQQNKELNTTEKDKKNNKKIRKYAFEQVKLMKNESPEKYMQYLQREMQEERTIKEAKKTNEEKPNYNFEKLLIQIFIKGFDTFLRNFDLNLNPAEELVGTVKEKAEGLRKRKERIAKILNVDEQIKTGDEEIAFWIFAKLLDARHLSELRNEMIKFKQSSVKKGLIKNGDLIEQMQPILELCILSNDSESMEKESFDKIEVFLEKVELAKNEPYMQEDKLTPVKFRFMKQLEKYQTRNFIENLVIENPEFKVSEKIVLNWHEEKEKIADLVDKRTKLHEEWASKAREIEEYNEKIKKNKSKKLDKPAEFAKFAEYKIICEAIENFNRLDHKVRLTYLKNLHYLMIDLMGRMVGFSVLFERDFVYMGRSYSALKKQSIYLNDYDTFANIRDWEVNENKHLFGTSSSDLTFQETAEFKNLKKPMENQLKALLGVTNHSFEIRNNIAHLHVLRNDGKGEGVSLLSCMNDLRKLMSYDRKLKNAVTKAIIKILDKHGMILKLTNNDHTKPFEIESLKPKKIIHLEKSNHSFPMDQVSQEYCDLVKKMLVFTN

SEQ ID NO: 198 - protein, 1154 aa, Paludibacter propionicigenes
MRVSKVKVKDGGKDKMVLVHRKTTGAQLVYSGQPVSNETSNILPEKKRQSFDLSTLNKTIIKFDTAKKQKLNVDQYKIVEKIFKYPKQELPKQIKAEEILPFLNHKFQEPVKYWKNGKEESFNLTLLIVEAVQAQDKRKLQPYYDWKTWYIQTKSDLLKKSIENNRIDLTENLSKRKKALLAWETEFTASGSIDLTHYHKVYMTDVLCKMLQDVKPLTDDKGKINTNAYHRGLKKALQNHQPAIFGTREVPNEANRADNQLSIYHLEVVKYLEHYFPIKTSKRRNTADDIAHYLKAQTLKTTIEKQLVNAIRANIIQQGKTNHHELKADTTSNDLIRIKTNEAFVLNLTGTCAFAANNIRNMVDNEQTNDILGKGDFIKSLLKDNTNSQLYSFFFGEGLSTNKAEKETQLWGIRGAVQQIRNNVNHYKKDALKTVFNISNFENPTITDPKQQTNYADTIYKARFINELEKIPEAFAQQLKTGGAVSYYTIENLKSLLTTFQFSLCRSTIPFAPGFKKVFNGGINYQNAKQDESFYELMLEQYLRKENFAEESYNARYFMLKLIYNNLFLPGFTTDRKAFADSVGFVQMQNKKQAEKVNPRKKEAYAFEAVRPMTAADSIADYMAYVQSELMQEQNKKEEKVAEETRINFEKFVLQVFIKGFDSFLRAKEFDFVQMPQPQLTATASNQQKADKLNQLEASITADCKLTPQYAKADDATHIAFYVFCKLLDAAHLSNLRNELIKFRESVNEFKFHHLLEIIEICLLSADVVPTDYRDLYSSEADCLARLRPFIEQGADITNWSDLFVQSDKHSPVIHANIELSVKYGTTKLLEQIINKDTQFKTTEANFTAWNTAQKSIEQLIKQREDHHEQWVKAKNADDKEKQERKREKSNFAQKFIEKHGDDYLDICDYINTYNWLDNKMHFVHLNRLHGLTIELLGRMAGFVALFDRDFQFFDEQQIADEFKLHGFVNLHSIDKKLNEVPTKKIKEIYDIRNKIIQINGNKINESVRANLIQFISSKRNYYNNAFLHVSNDEIKEKQMYDIRNHIAHFNYLTKDAADFSLIDLINELRELLHYDRKLKNAVSKAFIDLFDKHGMILKLKLNADHKLKVESLEPKKIYHLGSSAKDKPEYQYCTNQVMMAYCNMCRSLLEMKK

SEQ ID NO: 199 - protein, 970 aa, Listeria weihenstephanensis
MLALLHQEVPSQKLHNLKSLNTESLTKLFKPKFQNMISYPPSKGAEHVQFCLTDIAVPAIRDLDEIKPDWGIFFEKLKPYTDWAESYIHYKQTTIQKSIEQNKIQSPDSPRKLVLQKYVTAFLNGEPLGLDLVAKKYKLADLAESFKVVDLNEDKSANYKIKACLQQHQRNILDELKEDPELNQYGIEVKKYIQRYFPIKRAPNRSKHARADFLKKELIESTVEQQFKNAVYHYVLEQGKMEAYELTDPKTKDLQDIRSGEAFSFKFINACAFASNNLKMILNPECEKDILGKGDFKKNLPNSTTQSDVVKKMIPFFSDEIQNVNFDEAIWAIRGSIQQIRNEVYHCKKHSWKSILKIKGFEFEPNNMKYTDSDMQKLMDKDIAKIPDFIEEKLKSSGIIRFYSHDKLQSIWEMKQGFSLLTTNAPFVPSFKRVYAKGHDYQTSKNRYYDLGLTTFDILEYGEEDFRARYFLTKLVYYQQFMPWFTADNNAFRDAANFVLRLNKNRQQDAKAFINIREVEEGEMPRDYMGYVQGQIAIHEDSTEDTPNHFEKFISQVFIKGFDSHMRSADLKFIKNPRNQGLEQSEIEEMSFDIKVEPSFLKNKDDYIAFWTFCKMLDARHLSELRNEMIKYDGHLTGEQEIIGLALLGVDSRENDWKQFFSSEREYEKIMKGYVGEELYQREPYRQSDGKTPILFRGVEQARKYGTETVIQRLFDASPEFKVSKCNITEWERQKETIEETIERRKELHNEWEKNPKKPQNNAFFKEYKECCDAIDAYNWHKNKTTLVYVNELHHLLIEILGRYVGYVAIADRDFQCMANQYFKHSGITERVEYWGDNRLKSIKKLDTFLKKEGLFVSEKNARNHIAHLNYLSLKSECTLLYLSERLREIFKYDRKLKNAVSKSLIDILDRHGMSVVFANLKENKHRLVIKSLEPKKLRHLGEKKIDNGYIETNQVSEEYCGIVKRLLEI

SEQ ID NO: 200 - protein, 1051 aa, Listeria newyorkensis
MKITKMRVDGRTIVMERTSKEGQLGYEGIDGNKTTEIIFDKKKESFYKSILNKTVRKPDEKEKNRRKQAINKAINKEITELMLAVLHQEVPSQKLHNLKSLNTESLTKLFKPKFQNMISYPPSKGAEHVQFCLTDIAVPAIRDLDEIKPDWGIFFEKLKPYTDWAESYIHYKQTTIQKSIEQNKIQSPDSPRKLVLQKYVTAFLNGEPLGLDLVAKKYKLADLAESFKLVDLNEDKSANYKIKACLQQHQRNILDELKEDPELNQYGIEVKKYIQRYFPIKRAPNRSKHARADFLKKELIESTVEQQFKNAVYHYVLEQGKMEAYELTDPKTKDLQDIRSGEAFSFKFINACAFASNNLKMILNPECEKDILGKGNFKKNLPNSTTRSDVVKKMIPFFSDELQNVNFDEAIWAIRGSIQQIRNEVYHCKKHSWKSILKIKGFEFEPNNMKYADSDMQKLMDKDIAKIPEFIEEKLKSSGVVRFYRHDELQSIWEMKQGFSLLTTNAPFVPSFKRVYAKGHDYQTSKNRYYNLDLTTFDILEYGEEDFRARYFLTKLVYYQQFMPWFTADNNAFRDAANFVLRLNKNRQQDAKAFINIREVEEGEMPRDYMGYVQGQIAIHEDSIEDTPNHFEKFISQVFIKGFDRHMRSANLKFIKNPRNQGLEQSEIEEMSFDIKVEPSFLKNKDDYIAFWIFCKMLDARHLSELRNEMIKYDGHLTGEQEIIGLALLGVDSRENDWKQFFSSEREYEKIMKGYVVEELYQREPYRQSDGKTPILFRGVEQARKYGTETVIQRLFDANPEFKVSKCNLAEWERQKETIEETIKRRKELHNEWAKNPKKPQNNAFFKEYKECCDAIDAYNWHKNKTTLAYVNELHHLLIEILGRYVGYVAIADRDFQCMANQYFKHSGITERVEYWGDNRLKSIKKLDTFLKKEGLFVSEKNARNHIAHLNYLSLKSECTLLYLSERLREIFKYDRKLKNAVSKSLIDILDRHGMSVVFANLKENKHRLVIKSLEPKKLRHLGGKKIDGGYIETNQVSEEYCGIVKRLLEM

SEQ ID NO: 201 - protein, 1152 aa, Leptotrichia wadei
MKVTKVDGISHKKYIEEGKLVKSTSEENRTSERLSELLSIRLDIYIKNPDNASEEENRIRRENLKKFFSNKVLHLKDSVLYLKNRKEKNAVQDKNYSEEDISEYDLKNKNSFSVLKKILLNEDVNSEELEIFRKDVEAKLNKINSLKYSFEENKANYQKINENNVEKVGGKSKRNIIYDYYRESAKRNDYINNVQEAFDKLYKKEDIEKLFFLIENSKKHEKYKIREYYHKIIGRKNDKENFAKIIYEEIQNVNNIKELIEKIPDMSELKKSQVFYKYYLDKEELNDKNIKYAFCHFVEIEMSQLLKNYVYKRLSNISNDKIKRIFEYQNLKKLIENKLLNKLDTYVRNCGKYNYYLQVGEIATSDFIARNRQNEAFLRNIIGVSSVAYFSLRNILETENENDITGRMRGKTVKNNKGEEKYVSGEVDKIYNENKQNEVKENLKMFYSYDFNMDNKNEIEDFFANIDEAISSIRHGIVHFNLELEGKDIFAFKNIAPSEISKKMFQNEINEKKLKLKIFKQLNSANVFNYYEKDVIIKYLKNTKFNFVNKNIPFVPSFTKLYNKIEDLRNTLKFFWSVPKDKEEKDAQIYLLKNIYYGEFLNKFVKNSKVFFKITNEVIKINKQRNQKTGHYKYQKFENIEKTVPVEYLAIIQSREMINNQDKEEKNTYIDFIQQIFLKGFIDYLNKNNLKYIESNNNNDNNDIFSKIKIKKDNKEKYDKILKNYEKHNRNKEIPHEINEFVREIKLGKILKYTENLNMFYLILKLLNHKELTNLKGSLEKYQSANKEETFSDELELINLLNLDNNRVTEDFELEANEIGKFLDFNENKIKDRKELKKFDTNKIYFDGENIIKHRAFYNIKKYGMLNLLEKIADKAKYKISLKELKEYSNKKNEIEKNYTMQQNLHRKYARPKKDEKFNDEDYKEYEKAIGNIQKYTHLKNKVEFNELNLLQGLLLKILHRLVGYTSIWERDLRFRLKGEFPENHYIEEIFNFDNSKNVKYKSGQIVEKYINFYKELYKDNVEKRSIYSDKKVKKLKQEKKDLYIRNYIAHFNYIPHAEISLLEVLENLRKLLSYDRKLKNAIMKSIVDILKEYGFVATFKIGADKKIEIQTLESEKIVHLKNLKKKKLMTDRNSEELCELVKVMFEYKALE

SEQ ID NO: 202 - protein, 1285 aa, Rhodobacter capsulatus
MQIGKVQGRTISEFGDPAGGLKRKISTDGKNRKELPAHLSSDPKALIGQWISGIDKIYRKPDSRKSDGKAIHSPTPSKMQFDARDDLGEAFWKLVSEAGLAQDSDYDQFKRRLHPYGDKFQPADSGAKLKFEADPPEPQAFHGRWYGAMSKRGNDAKELAAALYEHLHVDEKRIDGQPKRNPKTDKFAPGLVVARALGIESSVLPRGMARLARNWGEEEIQTYFVVDVAASVKEVAKAAVSAAQAFDPPRQVSGRSLSPKVGFALAEHLERVTGSKRCSFDPAAGPSVLALHDEVKKTYKRLCARGKNAARAFPADKTELLALMRHTHENRVRNQMVRMGRVSEYRGQQAGDLAQSHYWTSAGQTEIKESEIFVRLWVGAFALAGRSMKAWIDPMGKIVNTEKNDRDLTAAVNIRQVISNKEMVAEAMARRGIYFGETPELDRLGAEGNEGFVFALLRYLRGCRNQTFHLGARAGFLKEIRKELEKTRWGKAKEAEHVVLTDKTVAAIRAIIDNDAKALGARLLADLSGAFVAHYASKEHFSTLYSEIVKAVKDAPEVSSGLPRLKLLLKRADGVRGYVHGLRDTRKHAFATKLPPPPAPRELDDPATKARYIALLRLYDGPFRAYASGITGTALAGPAARAKEAATALAQSVNVTKAYSDVMEGRTSRLRPPNDGETLREYLSALTGETATEFRVQIGYESDSENARKQAEFIENYRRDMLAFMFEDYIRAKGFDWILKIEPGATAMTRAPVLPEPIDTRGQYEHWQAALYLVMHFVPASDVSNLLHQLRKWEALQGKYELVQDGDATDQADARREALDLVKRFRDVLVLFLKTGEARFEGRAAPFDLKPFRALFANPATFDRLFMATPTTARPAEDDPEGDGASEPELRVARTLRGLRQIARYNHMAVLSDLFAKHKVRDEEVARLAEIEDETQEKSQIVAAQELRTDLHDKVMKCHPKTISPEERQSYAAAIKTIEEHRFLVGRVYLGDHLRLHRLMMDVIGRLIDYAGAYERDTGTFLINASKQLGAGADWAVTIAGAANTDARTQTRKDLAHFNVLDRADGTPDLTALVNRAREMMAYDRKRKNAVPRSILDMLARLGLTLKWQMKDHLLQDATITQAAIKHLDKVRLTVGGPAAVTEARFSQDYLQMVAAVFNGSVQNPKPRRRDDGDAWHKPPKPATAQSQPDQKPPNKAPSAGSRLPPPQVGEVYEGVVVKVIDTGSLGFLAVEGVAGNIGLHISRLRRIREDAIIVGRRYRFRVEIYVPPKSNTSKLNAADLVRID

SEQ ID NO: 203 - protein, 1285 aa, Rhodobacter capsulatus
MQIGKVQGRTISEFGDPAGGLKRKISTDGKNRKELPAHLSSDPKALIGQWISGIDKIYRKPDSRKSDGKAIHSPTPSKMQFDARDDLGEAFWKLVSEAGLAQDSDYDQFKRRLHPYGDKFQPADSGAKLKFEADPPEPQAFHGRWYGAMSKRGNDAKELAAALYEHLHVDEKRIDGQPKRNPKTDKFAPGLVVARALGIESSVLPRGMARLARNWGEEEIQTYFVVDVAASVKEVAKAAVSAAQAFDPPRQVSGRSLSPKVGFALAEHLERVTGSKRCSFDPAAGPSVLALHDEVKKTYKRLCARGKNAARAFPADKTELLALMRHTHENRVRNQMVRMGRVSEYRGQQAGDLAQSHYWTSAGQTEIKESEIFVRLWVGAFALAGRSMKAWIDPMGKIVNTEKNDRDLTAAVNIRQVISNKEMVAEAMARRGIYFGETPELDRLGAEGNEGFVFALLRYLRGCRNQTFHLGARAGFLKEIRKELEKTRWGKAKEAEHVVLTDKTVAAIRAIIDNDAKALGARLLADLSGAFVAHYASKEHFSTLYSEIVKAVKDAPEVSSGLPRLKLLLKRADGVRGYVHGLRDTRKHAFATKLPPPPAPRELDDPATKARYIALLRLYDGPFRAYASGITGTALAGPAARAKEAATALAQSVNVTKAYSDVMEGRSSRLRPPNDGETLREYLSALTGETATEFRVQIGYESDSENARKQAEFIENYRRDMLAFMFEDYIRAKGFDWILKIEPGATAMTRAPVLPEPIDTRGQYEHWQAALYLVMHFVPASDVSNLLHQLRKWEALQGKYELVQDGDATDQADARREALDLVKRFRDVLVLFLKTGEARFEGRAAPFDLKPFRALFANPATFDRLFMATPTTARPAEDDPEGDGASEPELRVARTLRGLRQIARYNHMAVLSDLFAKHKVRDEEVARLAEIEDETQEKSQIVAAQELRTDLHDKVMKCHPKTISPEERQSYAAAIKTIEEHRFLVGRVYLGDHLRLHRLMMDVIGRLIDYAGAYERDTGTFLINASKQLGAGADWAVTIAGAANTDARTQTRKDLAHFNVLDRADGTPDLTALVNRAREMMAYDRKRKNAVPRSILDMLARLGLTLKWQMKDHLLQDATITQAAIKHLDKVRLTVGGPAAVTEARFSQDYLQMVAAVFNGSVQNPKPRRRDDGDAWHKPPKPATAQSQPDQKPPNKAPSAGSRLPPPQVGEVYEGVVVKVIDTGSLGFLAVEGVAGNIGLHISRLRRIREDAIIVGRRYRFRVEIYVPPKSNTSKLNAADLVRID

SEQ ID NO: 204 - protein, 1285 aa, Rhodobacter capsulatus; identical to SEQ ID NO: 203

SEQ ID NO: 205 - protein, 1389 aa, Unknown
  Synthetic
MGNLFGHKRWYEVRDKKDFKIKRKVKVKRNYDGNKYILNINENNNKEKIDNNKFIRKYINYKKNDNILKEFTRKFHAGNILFKLKGKEGIIRIENNDDFLETEEVVLYIEAYGKSEKLKALGITKKKIIDEAIRQGITKDDKKIEIKRQENEEEIEIDIRDEYTNKTLNDCSIILRIIENDELETKKSIYEIFKNINMSLYKIIEKIIENETEKVFENRYYEEHLREKLLKDDKIDVILTNFMEIREKIKSNLEILGFVKFYLNVGGDKKKSKNKKMLVEKILNINVDLTVEDIADFVIKELEFWNITKRIEKVKKVNNEFLEKRRNRTYIKSYVLLDKHEKFKIERENKKDKIVKFFVENIKNNSIKEKIEKILAEFKIDELIKKLEKELKKGNCDTEIFGIFKKHYKVNFDSKKFSKKSDEEKELYKIIYRYLKGRIEKILVNEQKVRLKKMEKIEIEKILNESILSEKILKRVKQYTLEHIMYLGKLRHNDIDMTTVNTDDFSRLHAKEELDLELITFFASTNMELNKIFSRENINNDENIDFFGGDREKNYVLDKKILNSKIKIIRDLDFIDNKNNITNNFIRKFTKIGTNERNRILHAISKERDLQGTQDDYNKVINIIQNLKISDEEVSKALNLDVVFKDKKNIITKINDIKISEENNNDIKYLPSFSKVLPEILNLYRNNPKNEPFDTIETEKIVLNALIYVNKELYKKLILEDDLEENESKNIFLQELKKTLGNIDEIDENIIENYYKNAQISASKGNNKAIKKYQKKVIECYIGYLRKNYEELFDFSDFKMNIQEIKKQIKDINDNKTYERITVKTSDKTIVINDDFEYIISIFALLNSNAVINKIRNRFFATSVWLNTSEYQNIIDILDEIMQLNTLRNECITENWNLNLEEFIQKMKEIEKDFDDFKIQTKKEIFNNYYEDIKNNILTEFKDDINGCDVLEKKLEKIVIFDDETKFEIDKKSNILQDEQRKLSNINKKDLKKKVDQYIKDKDQEIKSKILCRIIFNSDFLKKYKKEIDNLIEDMESENENKFQEIYYPKERKNELYIYKKNLFLNIGNPNFDKIYGLISNDIKMADAKFLFNIDGKNIRKNKISEIDAILKNLNDKLNGYSKEYKEKYIKKLKENDDFFAKNIQNKNYKSFEKDYNRVSEYKKIRDLVEFNYLNKIESYLIDINWKLAIQMARFERDMHYIVNGLRELGIIKLSGYNTGISRAYPKRNGSDGFYTTTAYYKFFDEESYKKFEKICYGFGIDLSENSEINKPENESIRNYISHFYIVRNPFADYSIAEQIDRVSNLLSYSTRYNNSTYASVFEVFKKDVNLDYDELKKKFKLIGNNDILERLMKPKKVSVLELESYNSDYIKNLIIELLTKIENTNDTL

SEQ ID NO: 206 - protein, 1197 aa, L wadei
MKVTKVDGISHKKYIEEGKLVKSTSEENRTSERLSELLSIRLDIYIKNPDNASEEENRIRRENLKKFFSNKVLHLKDSVLYLKNRKEKNAVQDKNYSEEDISEYDLKNKNSFSVLKKILLNEDVNSEELEIFRKDVEAKLNKINSLKYSFEENKANYQKINENNVEKVGGKSKRNIIYDYYRESAKRNDYINNVQEAFDKLYKKEDIEKLFFLIENSKKHEKYKIREYYHKIIGRKNDKENFAKIIYEEIQNVNNIKELIEKIPDMSELKKSQVFYKYYLDKEELNDKNIKYAFCHFVEIEMSQLLKNYVYKRLSNISNDKIKRIFEYQNLKKLIENKLLNKLDTYVRNCGKYNYYLQVGEIATSDFIARNRQNEAFLRNIIGVSSVAYFSLRNILETENENDITGRMRGKTVKNNKGEEKYVSGEVDKIYNENKQNEVKENLKMFYSYDFNMDNKNEIEDFFANIDEAISSIRHGIVHFNLELEGKDIFAFKNIAPSEISKKMFQNEINEKKLKLKIFKQLNSANVFNYYEKDVIIKYLKNTKFNFVNKNIPFVPSFTKLYNKIEDLRNTLKFFWSVPKDKEEKDAQIYLLKNIYYGEFLNKFVKNSKVFFKITNEVIKINKQRNQKTGHYKYQKFENIEKTVPVEYLAIIQSREMINNQDKEEKNTYIDFIQQIFLKGFIDYLNKNNLKYIESNNNNDNNDIFSKIKIKKDNKEKYDKILKNYEKHNRNKEIPHEINEFVREIKLGKILKYTENLNMFYLILKLLNHKELTNLKGSLEKYQSANKEETFSDELELINLLNLDNNRVTEDFELEANEIGKFLDFNENKIKDRKELKKFDTNKIYFDGENIIKHRAFYNIKKYGMLNLLEKIADKAKYKISLKELKEYSNKKNEIEKNYTMQQNLHRKYARPKKDEKFNDEDYKEYEKAIGNIQKYTHLKNKVEFNELNLLQGLLLKILHRLVGYTSIWERDLRFRLKGEFPENHYIEEIFNFDNSKNVKYKSGQIVEKYINFYKELYKDNVEKRSIYSDKKVKKLKQEKKDLYIRNYIAHFNYIPHAEISLLEVLENLRKLLSYDRKLKNAIMKSIVDILKEYGFVATFKIGADKKIEIQTLESEKIVHLKNLKKKKLMTDRNSEELCELVKVMFEYKALEKRPAATKKAGQAKKKKGSYPYDVPDYAYPYDVPDYAYPYDVPDYA

SEQ ID NO: 207 - protein, 1120 aa, Listeria seeligeri
MWISIKTLIHHLGVLFFCDYMYNRREKKIIEVKTMRITKVEVDRKKVLISRDKNGGKLVYENEMQDNTEQIMHHKKSSFYKSVVNKTICRPEQKQMKKLVHGLLQENSQEKIKVSDVTKLNISNFLNHRFKKSLYYFPENSPDKSEEYRIEINLSQLLEDSLKKQQGTFICWESFSKDMELYINWAENYISSKTKLIKKSIRNNRIQSTESRSGQLMDRYMKDILNKNKPFDIQSVSEKYQLEKLTSALKATFKEAKKNDKEINYKLKSTLQNHERQIIEELKENSELNQFNIEIRKHLETYFPIKKTNRKVGDIRNLEIGEIQKIVNHRLKNKIVQRILQEGKLASYEIESTVNSNSLQKIKIEEAFALKFINACLFASNNLRNMVYPVCKKDILMIGEFKNSFKEIKHKKFIRQWSQFFSQEITVDDIELASWGLRGAIAPIRNEIIHLKKHSWKKFFNNPTFKVKKSKIINGKTKDVTSEFLYKETLFKDYFYSELDSVPELIINKMESSKILDYYSSDQLNQVFTIPNFELSLLTSAVPFAPSFKRVYLKGFDYQNQDEAQPDYNLKLNIYNEKAFNSEAFQAQYSLFKMVYYQVFLPQFTTNNDLFKSSVDFILTLNKERKGYAKAFQDIRKMNKDEKPSEYMSYIQSQLMLYQKKQEEKEKINHFEKFINQVFIKGFNSFIEKNRLTYICHPTKNTVPENDNIEIPFHTDMDDSNIAFWLMCKLLDAKQLSELRNEMIKFSCSLQSTEEISTFTKAREVIGLALLNGEKGCNDWKELFDDKEAWKKNMSLYVSEELLQSLPYTQEDGQTPVINRSIDLVKKYGTETILEKLFSSSDDYKVSAKDIAKLHEYDVTEKIAQQESLHKQWIEKPGLARDSAWTKKYQNVINDISNYQWAKTKVELTQVRHLHQLTIDLLSRLAGYMSIADRDFQFSSNYILERENSEYRVTSWILLSENKNKNKYNDYELYNLKNASIKVSSKNDPQLKVDLKQLRLTLEYLELFDNRLKEKRNNISHFNYLNGQLGNSILELFDDARDVLSYDRKLKNAVSKSLKEILSSHGMEVTFKPLYQTNHHLKIDKLQPKKIHHLGEKSTVSSNQVSNEYCQLVRTLLTMK

SEQ ID NO: 208 - protein, 1159 aa, Leptotrichia buccalis
MKVTKVGGISHKKYTSEGRLVKSESEENRTDERLSALLNMRLDMYIKNPSSTETKENQKRIGKLKKFFSNKMVYLKDNTLSLKNGKKENIDREYSETDILESDVRDKKNFAVLKKIYLNENVNSEELEVFRNDIKKKLNKINSLKYSFEKNKANYQKINENNIEKVEGKSKRNIIYDYYRESAKRDAYVSNVKEAFDKLYKEEDIAKLVLEIENLTKLEKYKIREFYHEIIGRKNDKENFAKIIYEEIQNVNNMKELIEKVPDMSELKKSQVFYKYYLDKEELNDKNIKYAFCHFVEIEMSQLLKNYVYKRLSNISNDKIKRIFEYQNLKKLIENKLLNKLDTYVRNCGKYNYYLQDGEIATSDFIARNRQNEAFLRNIIGVSSVAYFSLRNILETENENDITGRMRGKTVKNNKGEEKYVSGEVDKIYNENKKNEVKENLKMFYSYDFNMDNKNEIEDFFANIDEAISSIRHGIVHFNLELEGKDIFAFKNIAPSEISKKMFQNEINEKKLKLKIFRQLNSANVFRYLEKYKILNYLKRTRFEFVNKNIPFVPSFTKLYSRIDDLKNSLGIYWKTPKTNDDNKTKEIIDAQIYLLKNIYYGEFLNYFMSNNGNFFEISKEIIELNKNDKRNLKTGFYKLQKFEDIQEKIPKEYLANIQSLYMINAGNQDEEEKDTYIDFIQKIFLKGFMTYLANNGRLSLIYIGSDEETNTSLAEKKQEFDKFLKKYEQNNNIKIPYEINEFLREIKLGNILKYTERLNMFYLILKLLNHKELTNLKGSLEKYQSANKEEAFSDQLELINLLNLDNNRVTEDFELEADEIGKFLDFNGNKVKDNKELKKFDTNKIYFDGENIIKHRAFYNIKKYGMLNLLEKIADKAGYKISIEELKKYSNKKNEIEKNHKMQENLHRKYARPRKDEKFTDEDYESYKQAIENIEEYTHLKNKVEFNELNLLQGLLLRILHRLVGYTSIWERDLRFRLKGEFPENQYIEEIFNFENKKNVKYKGGQIVEKYIKFYKELHQNDEVKINKYSSANIKVLKQEKKDLYIRNYIAHFNYIPHAEISLLEVLENLRKLLSYDRKLKNAVMKSVVDILKEYGFVATFKIGADKKIGIQTLESEKIVHLKNLKKKKLMTDRNSEELCKLVKIMFEYKMEEKKSEN

SEQ ID NO: 209 - protein, 1285 aa, Herbinix hemicellulosilytica
MKLTRRRISGNSVDQKITAAFYRDMSQGLLYYDSEDNDCTDKVIESMDFERSWRGRILKNGEDDKNPFYMFVKGLVGSNDKIVCEPIDVDSDPDNLDILINKNLTGFGRNLKAPDSNDTLENLIRKIQAGIPEEEVLPELKKIKEMIQKDIVNRKEQLLKSIKNNRIPFSLEGSKLVPSTKKMKWLFKLIDVPNKTFNEKMLEKYWEIYDYDKLKANITNRLDKTDKKARSISRAVSEELREYHKNLRTNYNRFVSGDRPAAGLDNGGSAKYNPDKEEFLLFLKEVEQYFKKYFPVKSKHSNKSKDKSLVDKYKNYCSYKVVKKEVNRSIINQLVAGLIQQGKLLYYFYYNDTWQEDFLNSYGLSYIQVEEAFKKSVMTSLSWGINRLTSFFIDDSNTVKFDDITTKKAKEAIESNYFNKLRTCSRMQDHFKEKLAFFYPVYVKDKKDRPDDDIENLIVLVKNAIESVSYLRNRTFHFKESSLLELLKELDDKNSGQNKIDYSVAAEFIKRDIENLYDVFREQIRSLGIAEYYKADMISDCFKTCGLEFALYSPKNSLMPAFKNVYKRGANLNKAYIRDKGPKETGDQGQNSYKALEEYRELTWYIEVKNNDQSYNAYKNLLQLIYYHAFLPEVRENEALITDFINRTKEWNRKETEERLNTKNNKKHKNFDENDDITVNTYRYESIPDYQGESLDDYLKVLQRKQMARAKEVNEKEEGNNNYIQFIRDVVVWAFGAYLENKLKNYKNELQPPLSKENIGLNDTLKELFPEEKVKSPFNIKCRFSISTFIDNKGKSTDNTSAEAVKTDGKEDEKDKKNIKRKDLLCFYLFLRLLDENEICKLQHQFIKYRCSLKERRFPGNRTKLEKETELLAELEELMELVRFTMPSIPEISAKAESGYDTMIKKYFKDFIEKKVFKNPKTSNLYYHSDSKTPVTRKYMALLMRSAPLHLYKDIFKGYYLITKKECLEYIKLSNIIKDYQNSLNELHEQLERIKLKSEKQNGKDSLYLDKKDFYKVKEYVENLEQVARYKHLQHKINFESLYRIFRIHVDIAARMVGYTQDWERDMHFLFKALVYNGVLEERRFEAIFNNNDDNNDGRIVKKIQNNLNNKNRELVSMLCWNKKLNKNEFGAIIWKRNPIAHLNHFTQTEQNSKSSLESLINSLRILLAYDRKRQNAVTKTINDLLLNDYHIRIKWEGRVDEGQIYFNIKEKEDIENEPIIHLKHLHKKDCYIYKNSYMFDKQKEWICNGIKEEVYDKSILKCIGNLFKFDYEDKNKSSANPKHT

SEQ ID NO: 210 - protein, 1344 aa, Eubacterium rectale
MLRRDKEVKKLYNVFNQIQVGTKPKKWNNDEKLSPEENERRAQQKNIKMKNYKWREACSKYVESSQRIINDVIFYSYRKAKNKLRYMRKNEDILKKMQEAEKLSKFSGGKLEDFVAYTLRKSLVVSKYDTQEFDSLAAMVVFLECIGKNNISDHEREIVCKLLELIRKDFSKLDPNVKGSQGANIVRSVRNQNMIVQPQGDRFLFPQVYAKENETVTNKNVEKEGLNEFLLNYANLDDEKRAESLRKLRRILDVYFSAPNHYEKDMDITLSDNIEKEKFNVWEKHECGKKETGLFVDIPDVLMEAEAENIKLDAVVEKRERKVLNDRVRKQNIICYRYTRAVVEKYNSNEPLFFENNAINQYWIHHIENAVERILKNCKAGKLFKLRKGYLAEKVWKDAINLISIKYIALGKAVYNFALDDIWKDKKNKELGIVDERIRNGITSFDYEMIKAHENLQRELAVDIAFSVNNLARAVCDMSNLGNKESDFLLWKRNDIADKLKNKDDMASVSAVLQFFGGKSSWDINIFKDAYKGKKKYNYEVRFIDDLRKAIYCARNENFHFKTALVNDEKWNTELFGKIFERETEFCLNVEKDRFYSNNLYMFYQVSELRNMLDHLYSRSVSRAAQVPSYNSVIVRTAFPEYITNVLGYQKPSYDADTLGKWYSACYYLLKEIYYNSFLQSDRALQLFEKSVKTLSWDDKKQQRAVDNFKDHFSDIKSACTSLAQVCQIYMTEYNQQNNQIKKVRSSNDSIFDQPVYQHYKVLLKKAIANAFADYLKNNKDLFGFIGKPFKANEIREIDKEQFLPDWTSRKYEALCIEVSGSQELQKWYIVGKFLNARSLNLMVGSMRSYIQYVTDIKRRAASIGNELHVSVHDVEKVEKWVQVIEVCSLLASRTSNQFEDYFNDKDDYARYLKSYVDFSNVDMPSEYSALVDFSNEEQSDLYVDPKNPKVNRNIVHSKLFAADHILRDIVEPVSKDNIEEFYSQKAEIAYCKIKGKEITAEEQKAVLKYQKLKNRVELRDIVEYGEIINELLGQLINWSFMRERDLLYFQLGFHYDCLRNDSKKPEGYKNIKVDENSIKDAILYQIIGMYVNGVTVYAPEKDGDKLKEQCVKGGVGVKVSAFHRYSKYLGLNEKTLYNAGLEIFEVVAEHEDIINLRNGIDHFKYYLGDYRSMLSIYSEVFDRFFTYDIKYQKNVLNLLQNILLRHNVIVEPILESGFKTIGEQTKPGAKLSIRSIKSDTFQYKVKGGTLITDAKDERYLETIRKILYYAENEEDNLKKSVVVTNADKYEKNKESDDQNKQKEKKNKDNKGKKNEETKSDAEKNNNERLSYNPFANLNFKLSN

SEQ ID NO: 211 - protein, 1373 aa, Eubacteriaceae bacterium
MKISKESHKRTAVAVMEDRVGGVVYVPGGSGIDLSNNLKKRSMDTKSLYNVFNQIQAGTAPSEYEWKDYLSEAENKKREAQKMIQKANYELRRECEDYAKKANLAVSRIIFSKKPKKIFSDDDIISHMKKQRLSKFKGRMEDFVLIALRKSLVVSTYNQEVFDSRKAATVFLKNIGKKNISADDERQIKQLMALIREDYDKWNPDKDSSDKKESSGTKVIRSIEHQNMVIQPEKNKLSLSKISNVGKKTKTKQKEKAGLDAFLKEYAQIDENSRMEYLKKLRRLLDTYFAAPSSYIKGAAVSLPENINFSSELNVWERHEAAKKVNINFVEIPESLLNAEQNNNKINKVEQEHSLEQLRTDIRRRNITCYHFANALAADERYHTLFFENMAMNQFWIHHMENAVERILKKCNVGTLFKLRIGYLSEKVWKDMLNLLSIKYIALGKAVYHFALDDIWKADIWKDASDKNSGKINDLTLKGISSFDYEMVKAQEDLQREMAVGVAFSTNNLARVTCKMDDLSDAESDFLLWNKEAIRRHVKYTEKGEILSAILQFFGGRSLWDESLFEKAYSDSNYELKFLDDLKRAIYAARNETFHFKTAAIDGGSWNTRLFGSLFEKEAGLCLNVEKNKFYSNNLVLFYKQEDLRVFLDKLYGKECSRAAQIPSYNTILPRKSFSDFMKQLLGLKEPVYGSAILDQWYSACYYLFKEVYYNLFLQDSSAKALFEKAVKALKGADKKQEKAVESFRKRYWEISKNASLAEICQSYITEYNQQNNKERKVRSANDGMFNEPIYQHYKMLLKEALKMAFASYIKNDKELKFVYKPTEKLFEVSQDNFLPNWNSEKYNTLISEVKNSPDLQKWYIVGKFMNARMLNLLLGSMRSYLQYVSDIQKRAAGLGENQLHLSAENVGQVKKWIQVLEVCLLLSVRISDKFTDYFKDEEEYASYLKEYVDFEDSAMPSDYSALLAFSNEGKIDLYVDASNPKVNRNIIQAKLYAPDMVLKKVVKKISQDECKEFNEKKEQIMQFKNKGDEVSWEEQQKILEYQKLKNRVELRDLSEYGELINELLGQLINWSYLRERDLLYFQLGFHYSCLMNESKKPDAYKTIRRGTVSIENAVLYQIIAMYINGFPVYAPEKGELKPQCKTGSAGQKIRAFCQWASMVEKKKYELYNAGLELFEVVKEHDNIIDLRNKIDHFKYYQGNDSILALYGEIFDRFFTYDMKYRNNVLNHLQNILLRHNVIIKPIISKDKKEVGRGKMKDRAAFLLEEVSSDRFTYKVKEGERKIDAKNRLYLETVRDILYFPNRAVNDKGEDVIICSKKAQDLNEKKADRDKNHDKSKDTNQKKEGKNQEEKSENKEPYSDRMTWKPFAGIKLE

SEQ ID NO: 212 - protein, 1276 aa, Blautia species
MKISKVDHVKSGIDQKLSSQRGMLYKQPQKKYEGKQLEEHVRNLSRKAKALYQVFPVSGNSKMEKELQIINSFIKNILLRLDSGKTSEEIVGYINTYSVASQISGDHIQELVDQHLKESLRKYTCVGDKRIYVPDIIVALLKSKFNSETLQYDNSELKILIDFIREDYLKEKQIKQIVHSIENNSTPLRIAEINGQKRLIPANVDNPKKSYIFEFLKEYAQSDPKGQESLLQHMRYLILLYLYGPDKITDDYCEEIEAWNFGSIVMDNEQLFSEEASMLIQDRIYVNQQIEEGRQSKDTAKVKKNKSKYRMLGDKIEHSINESVVKHYQEACKAVEEKDIPWIKYISDHVMSVYSSKNRVDLDKLSLPYLAKNTWNTWISFIAMKYVDMGKGVYHFAMSDVDKVGKQDNLIIGQIDPKFSDGISSFDYERIKAEDDLHRSMSGYIAFAVNNFARAICSDEFRKKNRKEDVLTVGLDEIPLYDNVKRKLLQYFGGASNWDDSIIDIIDDKDLVACIKENLYVARNVNFHFAGSEKVQKKQDDILEEIVRKETRDIGKHYRKVFYSNNVAVFYCDEDIIKLMNHLYQREKPYQAQIPSYNKVISKTYLPDLIFMLLKGKNRTKISDPSIMNMFRGTFYFLLKEIYYNDFLQASNLKEMFCEGLKNNVKNKKSEKPYQNFMRRFEELENMGMDFGEICQQIMTDYEQQNKQKKKTATAVMSEKDKKIRTLDNDTQKYKHFRTLLYIGLREAFIIYLKDEKNKEWYEFLREPVKREQPEEKEFVNKWKLNQYSDCSELILKDSLAAAWYVVAHFINQAQLNHLIGDIKNYIQFISDIDRRAKSTGNPVSESTEIQIERYRKILRVLEFAKFFCGQITNVLTDYYQDENDFSTHVGHYVKFEKKNMEPAHALQAFSNSLYACGKEKKKAGFYYDGMNPIVNRNITLASMYGNKKLLENAMNPVTEQDIRKYYSLMAELDSVLKNGAVCKSEDEQKNLRHFQNLKNRIELVDVLTLSELVNDLVAQLIGWVYIRERDMMYLQLGLHYIKLYFTDSVAEDSYLRTLDLEEGSIADGAVLYQIASLYSFNLPMYVKPNKSSVYCKKHVNSVATKFDIFEKEYCNGDETVIENGLRLFENINLHKDMVKFRDYLAHFKYFAKLDESILELYSKAYDFFFSYNIKLKKSVSYVLTNVLLSYFINAKLSFSTYKSSGNKTVQHRTTKISVVAQTDYFTYKLRSIVKNKNGVESIENDDRRCEVVNIAARDKEFVDEVCNVINYNSDK

SEQ ID NO: 213 - protein, 1385 aa, Leptotrichia species
MGNLFGHKRWYEVRDKKDFKIKRKVKVKRNYDGNKYILNINENNNKEKIDNNKFIGEFVNYKKNNNVLKEFKRKFHAGNILFKLKGKEEIIRIENNDDFLETEEVVLYIEVYGKSEKLKALEITKKKIIDEAIRQGITKDDKKIEIKRQENEEEIEIDIRDEYTNKTLNDCSIILRIIENDELETKKSIYEIFKNINMSLYKIIEKIIENETEKVFENRYYEEHLREKLLKDNKIDVILTNFMEIREKIKSNLEIMGFVKFYLNVSGDKKKSENKKMFVEKILNTNVDLTVEDIVDFIVKELKFWNITKRIEKVKKFNNEFLENRRNRTYIKSYVLLDKHEKFKIERENKKDKIVKFFVENIKNNSIKEKIEKILAEFKINELIKKLEKELKKGNCDTEIFGIFKKHYKVNFDSKKFSNKSDEEKELYKIIYRYLKGRIEKILVNEQKVRLKKMEKIEIEKILNESILSEKILKRVKQYTLEHIMYLGKLRHNDIVKMTVNTDDFSRLHAKEELDLELITFFASTNMELNKIFNGKEKVTDFFGFNLNGQKITLKEKVPSFKLNILKKLNFINNENNIDEKLSHFYSFQKEGYLLRNKILHNSYGNIQETKNLKGEYENVEKLIKELKVSDEEISKSLSLDVIFEGKVDIINKINSLKIGEYKDKKYLPSFSKIVLEITRKFREINKDKLFDIESEKIILNAVKYVNKILYEKITSNEENEFLKTLPDKLVKKSNNKKENKNLLSIEEYYKNAQVSSSKGDKKAIKKYQNKVTNAYLEYLENTFTEIIDFSKFNLNYDEIKTKIEERKDNKSKIIIDSISTNINITNDIEYIISIFALLNSNTYINKIRNRFFATSVWLEKQNGTKEYDYENIISILDEVLLINLLRENNITDILDLKNAIIDAKIVENDETYIKNYIFESNEEKLKKRLFCEELVDKEDIRKIFEDENFKFKSFIKKNEIGNFKINFGILSNLECNSEVEAKKIIGKNSKKLESFIQNIIDEYKSNIRTLFSSEFLEKYKEEIDNLVEDTESENKNKFEKIYYPKEHKNELYIYKKNLFLNIGNPNFDKIYGLISKDIKNVDTKILFDDDIKKNKISEIDAILKNLNDKLNGYSNDYKAKYVNKLKENDDFFAKNIQNENYSSFGEFEKDYNKVSEYKKIRDLVEFNYLNKIESYLIDINWKLAIQMARFERDMHYIVNGLRELGIIKLSGYNTGISRAYPKRNGSDGFYTTTAYYKFFDEESYKKFEKICYGFGIDLSENSEINKPENESIRNYISHFYIVRNPFADYSIAEQIDRVSNLLSYSTRYNNSTYASVFEVFKKDVNLDYDELKKKFRLIGNNDILERLMKPKKVSVLELESYNSDYIKNLIIELLTKIENTNDTL

SEQ ID NO: 214 - protein, 1334 aa, Lachnospiraceae bacterium
MKISKVDHTRMAVAKGNQHRRDEISGILYKDPTKTGSIDFDERFKKLNCSAKILYHVFNGIAEGSNKYKNIVDKVNNNLDRVLFTGKSYDRKSIIDIDTVLRNVEKINAFDRISTEEREQIIDDLLEIQLRKGLRKGKAGLREVLLIGAGVIVRTDKKQEIADFLEILDEDFNKTNQAKNIKLSIENQGLVVSPVSRGEERIFDVSGAQKGKSSKKAQEKEALSAFLLDYADLDKNVRFEYLRKIRRLINLYFYVKNDDVMSLTEIPAEVNLEKDFDIWRDHEQRKEENGDFVGCPDILLADRDVKKSNSKQVKIAERQLRESIREKNIKRYRFSIKTIEKDDGTYFFANKQISVFWIHRIENAVERILGSINDKKLYRLRLGYLGEKVWKDILNFLSIKYIAVGKAVFNFAMDDLQEKDRDIEPGKISENAVNGLTSFDYEQIKADEMLQREVAVNVAFAANNLARVTVDIPQNGEKEDILLWNKSDIKKYKKNSKKGILKSILQFFGGASTWNMKMFEIAYHDQPGDYEENYLYDIIQIIYSLRNKSFHFKTYDHGDKNWNRELIGKMIEHDAERVISVEREKFHSNNLPMFYKDADLKKILDLLYSDYAGRASQVPAFNTVLVRKNFPEFLRKDMGYKVHFNNPEVENQWHSAVYYLYKEIYYNLFLRDKEVKNLFYTSLKNIRSEVSDKKQKLASDDFASRCEEIEDRSLPEICQIIMTEYNAQNFGNRKVKSQRVIEKNKDIFRHYKMLLIKTLAGAFSLYLKQERFAFIGKATPIPYETTDVKNFLPEWKSGMYASFVEEIKNNLDLQEWYIVGRFLNGRMLNQLAGSLRSYIQYAEDIERRAAENRNKLFSKPDEKIEACKKAVRVLDLCIKISTRISAEFTDYFDSEDDYADYLEKYLKYQDDAIKELSGSSYAALDHFCNKDDLKFDIYVNAGQKPILQRNIVMAKLFGPDNILSEVMEKVTESAIREYYDYLKKVSGYRVRGKCSTEKEQEDLLKFQRLKNAVEFRDVTEYAEVINELLGQLISWSYLRERDLLYFQLGFHYMCLKNKSFKPAEYVDIRRNNGTIIHNAILYQIVSMYINGLDFYSCDKEGKTLKPIETGKGVGSKIGQFIKYSQYLYNDPSYKLEIYNAGLEVFENIDEHDNITDLRKYVDHFKYYAYGNKMSLLDLYSEFFDRFFTYDMKYQKNVVNVLENILLRHFVIFYPKFGSGKKDVGIRDCKKERAQIEISEQSLTSEDFMFKLDDKAGEEAKKFPARDERYLQTIAKLLYYPNEIEDMNRFMKKGETINKKVQFNRKKKITRKQKNNSSNEVLSSTMGYLFKNIKL

SEQ ID NO: 215 - protein, 500 aa, Chloroflexus aggregans
MTDQVRREEVAAGELADTPLAAAQTPAADAAVAATPAPAEAVAPTPEQAVDQPATTGESEAPVTTAQAAAHEAEPAEATGASFTPVSEQQPQKPRRLKDLQPGMELEGKVTSIALYGIFVDVGVGRDGLVHISEMSDRRIDTPSELVQIGDTVKVWVKSVDLDARRISLTMLNPSRGEKPRRSRQSQPAQPQPRRQEVDREKLASLKVGEIVEGVITGFAPFGAFADIGVGKDGLIHISELSEGRVEKPEDAVKVGERYQFKVLEIDGEGTRISLSLRRAQRTQRMQQLEPGQIIEGTVSGIATFGAFVDIGVGRDGLVHISALAPHRVAKVEDVVKVGDKVKVKVLGVDPQSKRISLTMRLEEEQPATTAGDEAAEPAEEVTPTRRGNLERFAAAAQTARERSERGERSERGERRERRERRPAQSSPDTYIVGEDDDESFEGNATIEDLLTKFGGSSSRRDRDRRRRHEDDDDEEMERPSNRRQREAIRRTLQQIGYDE

SEQ ID NO: 216 - protein, 249 aa, Demequina aurantiaca
MDLTWHALLILFIVALLAGFLDTLAGGGGLLTVPALLLTGIPPLQALGTNKLQSSFGTGMATYQVIRKKRVHWRDVRWPMVWAFLGSAAGAVAVQFIDTDALLIIIPVVLALVAAYFLFVPKSHLPPPEPRMSDPAYEATLVPIIGAYDGAFGPGTGSLYALSGVALRAKTLVQSTAIAKTLNFATNFAALLVFAFAGHMLWTVGAVMIAGQLIGAYAGSHMLFRVNPLVLRVLIVVMSLGMLIRVLLD

SEQ ID NO: 217 - protein, 1235 aa, Thalassospira species
MRIIKPYGRSHVEGVATQEPRRKLRLNSSPDISRDIPGFAQSHDALIIAQWISAIDKIATKPKPDKKPTQAQINLRTTLGDAAWQHVMAENLLPAATDPAIREKLHLIWQSKIAPWGTARPQAEKDGKPTPKGGWYERFCGVLSPEAITQNVARQIAKDIYDHLHVAAKRKGREPAKQGESSNKPGKFKPDRKRGLIEERAESIAKNALRPGSHAPCPWGPDDQATYEQAGDVAGQIYAAARDCLEEKKRRSGNRNTSSVQYLPRDLAAKILYAQYGRVFGPDTTIKAALDEQPSLFALHKAIKDCYHRLINDARKRDILRILPRNMAALFRLVRAQYDNRDINALIRLGKVIHYHASEQGKSEHHGIRDYWPSQQDIQNSRFWGSDGQADIKRHEAFSRIWRHIIALASRTLHDWADPHSQKFSGENDDILLLAKDAIEDDVFKAGHYERKCDVLFGAQASLFCGAEDFEKAILKQAITGTGNLRNATFHFKGKVRFEKELQELTKDVPVEVQSAIAALWQKDAEGRTRQIAETLQAVLAGHFLTEEQNRHIFAALTAAMAQPGDVPLPRLRRVLARHDSICQRGRILPLSPCPDRAKLEESPALTCQYTVLKMLYDGPFRAWLAQQNSTILNHYIDSTIARTDKAARDMNGRKLAQAEKDLITSRAADLPRLSVDEKMGDFLARLTAATATEMRVQRGYQSDGENAQKQAAFIGQFECDVIGRAFADFLNQSGFDFVLKLKADTPQPDAAQCDVTALIAPDDISVSPPQAWQQVLYFILHLVPVDDASHLLHQIRKWQVLEGKEKPAQIAHDVQSVLMLYLDMHDAKFTGGAALHGIEKFAEFFAHAADFRAVFPPQSLQDQDRSIPRRGLREIVRFGHLPLLQHMSGTVQITHDNVVAWQAARTAGATGMSPIARRQKQREELHALAVERTARFRNADLQNYMHALVDVIKHRQLSAQVTLSDQVRLHRLMMGVLGRLVDYAGLWERDLYFVVLALLYHHGATPDDVFKGQGKKNLADGQVVAALKPKNRKAAAPVGVFDDLDHYGIYQDDRQSIRNGLSHFNMLRGGKAPDLSHWVNQTRSLVAHDRKLKNAVAKSVIEMLAREGFDLDWGIQTDRGQHILSHGKIRTRQAQHFQKSRLHIVKKSAKPDKNDTVKIRENLHGDAMVERVVQLFAAQVQKRYDITVEKRLDHLFLKPQDQKGKNGIHTHNGWSKTEKKRRPSRENRKGNHEN

SEQ ID NO: 218 - protein, 1312 aa, Pseudobutyrivibrio species
MKFSKESHRKTAVGVTESNGIIGLLYKDPLNEKEKIEDVVNQRANSTKRLFNLFGTEATSKDISRASKDLAKVVNKAIGNLKGNKKFNKKEQITKGLNTKIIVEELKNVLKDEKKLIVNKDIIDEACSRLLKTSFRTAKTKQAVKMILTAVLIENTNLSKEDEAFVHEYFVKKLVNEYNKTSVKKQIPVALSNQNMVIQPNSVNGTLEISETKKSKETKTTEKDAFRAFLRDYATLDENRRHKMRLCLRNLVNLYFYGETSVSKDDFDEWRDHEDKKQNDELFVKKIVSIKTDRKGNVKEVLDVDATIDAIRTNNIACYRRALAYANENPDVFFSDTMLNKFWIHHVENEVERIYGHINNNTGDYKYQLGYLSEKVWKGIINYLSIKYIAEGKAVYNYAMNALAKDNNSNAFGKLDEKFVNGITSFEYERIKAEETLQRECAVNIAFAANHLANATVDLNEKDSDFLLLKHEDNKDTLGAVARPNILRNILQFFGGKSRWNDFDFSGIDEIQLLDDLRKMIYSLRNSSFHFKTENIDNDSWNTKLIGDMFAYDFNMAGNVQKDKMYSNNVPMFYSTSDIEKMLDRLYAEVHERASQVPSFNSVFVRKNFPDYLKNDLKITSAFGVDDALKWQSAVYYVCKEIYYNDFLQNPETFTMLKDYVQCLPIDIDKSMDQKLKSERNAHKNFKEAFATYCKECDSLSAICQMIMTEYNNQNKGNRKVISARTKDGDKLIYKHYKMILFEALKNVFTIYLEKNINTYGFLKKPKLINNVPAIEEFLPNYNGRQYETLVNRITEETELQKWYIVGRLLNPKQVNQLIGNFRSYVQYVNDVARRAKQTGNNLSNDNIAWDVKNIIQIFDVCTKLNGVTSNILEDYFDDGDDYARYLKNFVDYTNKNNDHSATLLGDFCAKEIDGIKIGIYHDGTNPIVNRNIIQCKLYGATGIISDLTKDGSILSVDYEIIKKYMQMQKEIKVYQQKGICKTKEEQQNLKKYQELKNIVELRNIIDYSEILDELQGQLINWGYLRERDLMYFQLGFHYLCLHNESKKPVGYNNAGDISGAVLYQIVAMYTNGLSLIDANGKSKKNAKASAGAKVGSFCSYSKEIRGVDKDTKEDDDPIYLAGVELFENINEHQQCINLRNYIEHFHYYAKHDRSMLDLYSEVFDRFFTYDMKYTKNVPNMMYNILLQHLVVPAFEFGSSEKRLDDNDEQTKPRAMFTLREKNGLSSEQFTYRLGDGNSTVKLSARGDDYLRAVASLLYYPDRAPEGLIRDAEAEDKFAKINHSNPKSDNRNNRGNFKNPKVQWYNNKTKRK

SEQ ID NO: 219 - protein, 1343 aa, Butyrivibrio species
MKISKVDHRKTAVKITDNKGAEGFIYQDPTRDSSTMEQIISNRARSSKVLFNIFGDTKKSKDLNKYTESLIIYVNKAIKSLKGDKRNNKYEEITESLKTERVLNALIQAGNEFTCSENNIEDALNKYLKKSFRVGNTKSALKKLLMAAYCGYKLSIEEKEEIQNYFVDKLVKEYNKDTVLKYTAKSLKHQNMVVQPDTDNHVFLPSRIAGATQNKMSEKEALTEFLKAYAVLDEEKRHNLRIILRKLVNLYFYESPDFIYPENNEWKEHDDRKNKTETFVSPVKVNEEKNGKTFVKIDVPATKDLIRLKNIECYRRSVAETAGNPITYFTDHNISKFWIHHIENEVEKIFALLKSNWKDYQFSVGYISEKVWKEIINYLSIKYIAIGKAVYNYALEDIKKNDGTLNFGVIDPSFYDGINSFEYEKIKAEETFQREVAVYVSFAVNHLSSATVKLSEAQSDMLVLNKNDIEKIAYGNTKRNILQFFGGQSKWKEFDFDRYINPVNYTDIDFLFDIKKMVYSLRNESFHFTTTDTESDWNKNLISAMFEYECRRISTVQKNKFFSNNLPLFYGENSLERVLHKLYDDYVDRMSQVPSFGNVFVRKKFPDYMKEIGIKHNLSSEDNLKLQGALYFLYKEIYYNAFISSEKAMKIFVDLVNKLDTNARDDKGRITHEAMAHKNFKDAISHYMTHDCSLADICQKIMTEYNQQNTGHRKKQTTYSSEKNPEIFRHYKMILFMLLQKAMTEYISSEEIFDFIMKPNSPKTDIKEEEFLPQYKSCAYDNLIKLIADNVELQKWYITARLLSPREVNQLIGSFRSYKQFVSDIERRAKETNNSLSKSGMTVDVENITKVLDLCTKLNGRFSNELTDYFDSKDDYAVYVSKFLDFGFKIDEKFPAALLGEFCNKEENGKKIGIYHNGTEPILNSNIIKSKLYGITDVVSRAVKPVSEKLIREYLQQEVKIKPYLENGVCKNKEEQAALRKYQELKNRIEFRDIVEYSEIINELMGQLINFSYLRERDLMYFQLGFHYLCLNNYGAKPEGYYSIVNDKRTIKGAILYQIVAMYTYGLPIYHYVDGTISDRRKNKKTVLDTLNSSETVGAKIKYFIYYSDELFNDSLILYNAGLELFENINEHENIVNLRKYIDHFKYYVSQDRSLLDIYSEVFDRYFTYDRKYKKNVMNLFSNIMLKHFIITDFEFSTGEKTIGEKNTAKKECAKVRIKRGGLSSDKFTYKFKDAKPIELSAKNTEFLDGVARILYYPENVVLTDLVRNSEVEDEKRIEKYDRNHNSSPTRKDKTYKQDVKKNYNKKTSKAFDSSKLDTKSVGNNLSDNPVLKQFLSESKKKR

SEQ ID NO: 220 - protein, 1276 aa, Blautia species; identical to SEQ ID NO: 212

SEQ ID NO: 221 - protein, 1168 aa, Leptotrichia species
MKITKIDGISHKKYIKEGKLVKSTSEENKTDERLSELLTIRLDTYIKNPDNASEEENRIRRENLKEFFSNKVLYLKDGILYLKDRREKNQLQNKNYSEEDISEYDLKNKNNFLVLKKILLNEDINSEELEIFRNDFEKKLDKINSLKYSLEENKANYQKINENNIKKVEGKSKRNIFYNYYKDSAKRNDYINNIQEAFDKLYKKEDIENLFFLIENSKKHEKYKIRECYHKIIGRKNDKENFATIIYEEIQNVNNMKELIEKVPNVSELKKSQVFYKYYLNKEKLNDENIKYVFCHFVEIEMSKLLKNYVYKKPSNISNDKVKRIFEYQSLKKLIENKLLNKLDTYVRNCGKYSFYLQDGEIATSDFIVGNRQNEAFLRNIIGVSSTAYFSLRNILETENENDITGRMRGKTVKNNKGEEKYISGEIDKLYDNNKQNEVKKNLKMFYSYDFNMNSKKEIEDFFSNIDEAISSIRHGIVHFNLELEGKDIFTFKNIVPSQISKKMFHDEINEKKLKLKIFKQLNSANVFRYLEKYKILNYLNRTRFEFVNKNIPFVPSFTKLYSRIDDLKNSLGIYWKTPKTNDDNKTKEITDAQIYLLKNIYYGEFLNYFMSNNGNFFEITKEIIELNKNDKRNLKTGFYKLQKFENLQEKTPKEYLANIQSLYMINAGNQDEEEKDTYIDFIQKIFLKGFMTYLANNGRLSLIYIGSDEETNTSLAEKKQEFDKFLKKYEQNNNIEIPYEINEFVREIKLGKILKYTERLNMFYLILKLLNHKELTNLKGSLEKYQSANKEEAFSDQLELINLLNLDNNRVTEDFELEADEIGKFLDFNGNKVKDNKELKKFDTNKIYFDGENIIKHRAFYNIKKYGMLNLLEKISDEAKYKISIEELKNYSKKKNEIEENHTTQENLHRKYARPRKDEKFTDEDYKKYEKAIRNIQQYTHLKNKVEFNELNLLQSLLLRILHRLVGYTSIWERDLRFRLKGEFPENQYIEEIFNFDNSKNVKYKNGQIVEKYINFYKELYKDDTEKISIYSDKKVKELKKEKKDLYIRNYIAHFNYIPNAEISLLEMLENLRKLLSYDRKLKNAIMKSIVDILKEYGFVVTFKIEKDKKIRIESLKSEEVVHLKKLKLKDNDKKKEPIKTYRNSKELCKLVKVMFEYKMKEKKSEN

SEQ ID NO: 222 - protein, 1138 aa, Bacteroides ihuae
MRITKVKVKESSDQKDKMVLIHRKVGEGTLVLDENLADLTAPIIDKYKDKSFELSLLKQTLVSEKEMNIPKCDKCTAKERCLSCKQREKRLKEVRGAIEKTIGAVIAGRDIIPRLNIFNEDEICWLIKPKLRNEFTFKDVNKQVVKLNLPKVLVEYSKKNDPTLFLAYQQWIAAYLKNKKGHIKKSILNNRVVIDYSDESKLSKRKQALELWGEEYETNQRIALESYHTSYNIGELVTLLPNPEEYVSDKGEIRPAFHYKLKNVLQMHQSTVFGTNEILCINPIFNENRANIQLSAYNLEVVKYFEHYFPIKKKKKNLSLNQAIYYLKVETLKERLSLQLENALRMNLLQKGKIKKHEFDKNTCSNTLSQIKRDEFFVLNLVEMCAFAANNIRNIVDKEQVNEILSKKDLCNSLSKNTIDKELCTKFYGADFSQIPVAIWAMRGSVQQIRNEIVHYKAEAIDKIFALKTFEYDDMEKDYSDTPFKQYLELSIEKIDSFFIEQLSSNDVLNYYCTEDVNKLLNKCKLSLRRTSIPFAPGFKTIYELGCHLQDSSNTYRIGHYLMLIGGRVANSTVTKASKAYPAYRFMLKLIYNHLFLNKFLDNHNKRFFMKAVAFVLKDNRENARNKFQYAFKEIRMMNNDESIASYMSYIHSLSVQEQEKKGDKNDKVRYNTEKFIEKVFVKGFDDFLSWLGVEFILSPNQEERDKTVTREEYENLMIKDRVEHSINSNQESHIAFFTFCKLLDANHLSDLRNEWIKFRSSGDKEGFSYNFAIDIIELCLLTVDRVEQRRDGYKEQTELKEYLSFFIKGNESENTVWKGFYFQQDNYTPVLYSPIELIRKYGTLELLKLIIVDEDKITQGEFEEWQTLKKVVEDKVTRRNELHQEWEDMKNKSSFSQEKCSIYQKLCRDIDRYNWLDNKLHLVHLRKLHNLVIQILSRMARFIALWDRDFVLLDASRANDDYKLLSFFNFRDFINAKKTKTDDELLAEFGSKIEKKNAPFIKAEDVPLMVECIEAKRSFYQKVFFRNNLQVLADRNFIAHYNYISKTAKCSLFEMIIKLRTLMYYDRKLRNAVVKSIANVFDQNGMVLQLSLDDSHELKVDKVISKRIVHLKNNNIMTDQVPEEYYKICRRLLEMKK

SEQ ID NO: 223 - protein, 697 aa, Porphyromonadaceae bacterium
MEFRDSIFKSLLQKEIEKAPLCFAEKLISGGVFSYYPSERLKEFVGNHPFSLFRKTMPFSPGFKRVMKSGGNYQNANRDGRFYDLDIGVYLPKDGFGDEEWNARYFLMKLIYNQLFLPYFADAENHLFRECVDFVKRVNRDYNCKNNNSEEQAFIDIRSMREDESIADYLAFIQSNIIIEENKKKETNKEGQINFNKFLLQVFVKGFDSFLKDRTELNFLQLPELQGDGTRGDDLESLDKLGAVVAVDLKLDATGIDADLNENISFYTFCKLLDSNHLSRLRNEIIKYQSANSDFSHNEDFDYDRIISIIELCMLSADHVSTNDNESIFPNNDKDFSGIRPYLSTDAKVETFEDLYVHSDAKTPITNATMVLNWKYGTDKLFERLMISDQDFLVTEKDYFVWKELKKDIEEKIKLREELHSLWVNTPKGKKGAKKKNGRETTGEFSEENKKEYLEVCREIDRYVNLDNKLHFVHLKRMHSLLIELLGRFVGFTYLFERDYQYYHLEIRSRRNKDAGVVDKLEYNKIKDQNKYDKDDFFACTFLYEKANKVRNFIAHFNYLTMWNSPQEEEHNSNLSGAKNSSGRQNLKCSLTELINELREVMSYDRKLKNAVTKAVIDLFDKHGMVIKFRIVNNNNNDNKNKHHLELDDIVPKKIMHLRGIKLKRQDGKPIPIQTDSVDPLYCRMWKKLLDLKPTPF

SEQ ID NO: 224 - protein, 204 aa, Listeria riparia
MHDAWAENPKKPQSDAFLKEYKACCEAIDTYNWHKNKATLVYVNELHHLLIDILGRLVGYVAIADRDFQCMANQYLKSSGHTERVDSWINTIRKNRPDYIEKLDIFMNKAGLFVSEKNGRNYIAHLNYLSPKHKYSLLYLFEKLREMLKYDRKLKNAVTKSLIDLLDKHGMCVVFANLKNNKHRLVIASLKPKKIETFKWKKIK

SEQ ID NO: 225 - protein, 1082 aa, Insolitispirillum peregrinum
MRIIRPYGSSTVASPSPQDAQPLRSLQRQNGTFDVAEFSRRHPELVLAQWVAMLDKIIRKPAPGKNSTALPRPTAEQRRLRQQVGAALWAEMQRHTPVPPELKAVWDSKVHPYSKDNAPATAKTPSHRGRWYDRFGDPETSAATVAEGVRRHLLDSAQPFRANGGQPKGKGVIEHRALTIQNGTLLHHHQSEKAGPLPEDWSTYRADELVSTIGKDARWIKVAASLYQHYGRIFGPTTPISEAQTRPEFVLHTAVKAYYRRLFKERKLPAERLERLLPRTGEALRHAVTVQHGNRSLADAVRIGKILHYGWLQNGEPDPWPDDAALYSSRYWGSDGQTDIKHSEAVSRVWRRALTAAQRTLTSWLYPAGTDAGDILLIGQKPDSIDRNRLPLLYGDSTRHWTRSPGDVWLFLKQTLENLRNSSFHFKTLSAFTSHLDGTCESEPAEQQAAQALWQDDRQQDHQQVFLSLRALDATTYLPTGPLHRIVNAVQSTDATLPLPRFRRVVTRAANTRLKGFPVEPVNRRTMEDDPLLRCRYGVLKLLYERGFRAWLETRPSIASCLDQSLKRSTKAAQTINGKNSPQGVEILSRATKLLQAEGGGGHGIHDLFDRLYAATAREMRVQVGYHHDAEAARQQAEFIEDLKCEVVARAFCAYLKTLGIQGDTFRRQPEPLPTWPDLPDLPSSTIGTAQAALYSVLHLMPVEDVGSLLHQLRRWLVALQARGGEDGTAITATIPLLELYLNRHDAKFSGGGAGTGLRWDDWQVFFDCQATFDRVFPPGPALDSHRLPLRGLREVLRFGRVNDLAALIGQDKITAAEVDRWHTAEQTIAAQQQRREALHEQLSRKKGTDAEVDEYRALVTAIADHRHLTAHVTLSNVVRLHRLMTTVLGRLVDYGGLWERDLTFVTLYEAHRLGGLRNLLSESRVNKFLDGQTPAALSKKNNAEENGMISKVLGDKARRQIRNDFAHFNMLQQGKKTINLTDEINNARKLMAHDRKLKNAITRSVTTLLQQDGLDIVWTMDASHRLTDAKIDSRNAIHLHKTHNRANIREPLHGKSYCRWVAALFGATSTPSATKKSDKIR

SEQ ID NO: 226 - protein, 1115 aa, Fusobacterium necrophorum
MEKFRRQNRNSIIKIIISNYDTKGIKELKVRYRKQAQLDTFIIKTEIVNNDIFIKSIIEKAREKYRYSFLFDGEEKYHFKNKSSVEIVKKDIFSQTPDNMIRNYKITLKISEKNPRVVEAEIEDLMNSTILKDGRRSARREKSMTERKLIEEKVAKNYSLLANCPMEEVDSIKIYKIKRFLTYRSNMLLYFASINSFLCEGIKGKDNETEEIWHLKDNDVRKEKVRENFKNKLIQSTENYNSSLKNQIEEKEKLLRKEFKKGAFYRTIIKKLQQERIKELSEKSLTEDCEKIIKLYSKLRHSLMHYDYQYFENLFENKKNDDLMKDLNLDLFKSLPLIRKMKLNNKVNYLEDGDTLFVLQKTKKAKTLYQIYDALCEQKNGFNKFINDFFVSDGEENTVFKQIINEKFQSEMEFLEKRISESEKKNEKLKKKLDSMKAHFRNINSEDTKEAYFWDIHSSRNYKTKYNERKNLVNEYTELLGSSKEKKLLREEITKINRQLLKLKQEMEEITKKNSLFRLEYKMKIAFGFLFCEFDGNISKFKDEFDASNQEKIIQYHKNGEKYLTSFLKEEEKEKFNLEKMQKIIQKTEEEDWLLPETKNNLFKFYLLTYLLLPYELKGDFLGFVKKHYYDIKNVDFIDENQNNIQVSQTVEKQEDYFYHKIRLFEKNTKKYEIVKYSIVPNEKLKQYFEDLGIDIKYLTVEQKSEVSEEKNKKVSLKNNGMFNKTILLFVFKYYQIAFKLFNDIELYSLFFLREKSGKPLEIFRKELESKMKDGYLNFGQLLYVVYEVLVKNKDLDKILSKKIDYRKDKSFSPEIAYLRNFLSHLNYSKFLDNFMKINTNKSDENKEVLIPSIKIQKMIQFIEKCNLQNQIDFDFNFVNDFYMRKEKMFFIQLKQIFPDINSTEKQKMNEKEEILRNRYHLTDKKNEQIKDEHEAQSQLYEKILSLQKIYSSDKNNFYGRLKEEKLLFLEKQGKKKLSMEEIKDKIAGDISDLLGILKKEITRDIKDKLTEKFRYCEEKLLNLSFYNHQDKKKEESIRVFLIRDKNSDNFKFESILDDGSNKIFISKNGKEITIQCCDKVLETLIIEKNTLKISSNGKIISLIPHYSYSIDVKY

SEQ ID NO: 227 - protein, 1111 aa, Fusobacterium necrophorum
MEKFRRQNRSSIIKIIISNYDTKGIKELKVRYRKQAQLDTFIIKTEIVNNDIFIKSIIEKAREKYRYSFLFDGEEKYHFKNKSSVEIVKKDIFSQTPDNMIRNYKITLKISEKNPRVVEAEIEDLMNSTILKDGRRSARREKSMTERKLIEEKVAENYSLLANCPMEEVDSIKIYKIKRFLTYRSNMLLYFASINSFLCEGIKGKDNETEEIWHLKDNDVRKEKVKENFKNKLIQSTENYNSSLKNQIEEKEKLLRKESKKGAFYRTIIKKLQQERIKELSEKSLTEDCEKIIKLYSELRHPLMHYDYQYFENLFENKENSELTKNLNLDIFKSLPLVRKMKLNNKVNYLEDNDTLFVLQKTKKAKTLYQIYDALCEQKNGFNKFINDFFVSDGEENTVFKQIINEKFQSEIEFLEKRISESEKKNEKLKKKLDSMKAHFRNINSEDTKEAYFWDIHSSRNYKTKYNERKNLVNEYTELLGSSKEKKLLREEITKINRQLLKLKQEMEEITKKNSLFRLEYKMKMAFGFLFCEFDGNISRFKDEFDASNQEKIIQYHKNGEKYLTYFLKEEEKEKFNLKKLQETIQKTGEENWLLPQNKNNLFKFYLLTYLLLPYELKGDFLGFVKKHYYDIKNVDFMDENQSSKIIESKEDDFYHKIRLFEKNTKKYEIVKYSIVPDKKLKQYFKDLGIDTKYLILDQKSEVSGEKNKKVSLKNNGMFNKTILLFVFKYYQIAFKLFNDIELYSLFFLREKSGKPFEVFLKELKDKMIGKQLNFGQLLYVVYEVLVKNKDLSEILSERIDYRKDMCFSAEIADLRNFLSHLNYSKFLDNFMKINTNKSDENKEVLIPSIKIQKMIKFIEECNLQSQIDFDFNFVNDFYMRKEKMFFIQLKQIFPDINSTEKQKMNEKEEILRNRYHLTDKKNEQIKDEHEAQSQLYEKILSLQKIYSSDKNNFYGRLKEEKLLFLEKQEKKKLSMEEIKDKIAGDISDLLGILKKEITRDIKDKLTEKFRYCEEKLLNLSFYNHQDKKKEESIRVFLIRDKNSDNFKFESILDDGSNKIFISKNGKEITIQCCDKVLETLIIEKNTLKISSNGKIISLIPHYSYSIDVKY

SEQ ID NO: 228 - protein, 1110 aa, Fusobacterium necrophorum
MKVRYRKQAQLDTFIIKTEIVNNDIFIKSIIEKAREKYRYSFLFDGEEKYHFKNKSSVEIVKNDIFSQTPDNMIRNYKITLKISEKNPRVVEAEIEDLMNSTILKDGRRSARREKSMTERKLIEEKVAENYSLLANCPIEEVDSIKIYKIKRFLTYRSNMLLYFASINSFLCEGIKGKDNETEEIWHLKDNDVRKEKVKENFKNKLIQSTENYNSSLKNQIEEKEKLSSKEFKKGAFYRTIIKKLQQERIKELSEKSLTEDCEKIIKLYSELRHPLMHYDYQYFENLFENKENSELTKNLNLDIFKSLPLVRKMKLNNKVNYLEDNDTLFVLQKTKKAKTLYQIYDALCEQKNGFNKFINDFFVSDGEENTVFKQIINEKFQSEMEFLEKRISESEKKNEKLKKKLDSMKAHFRNINSEDTKEAYFWDIHSSRNYKTKYNERKNLVNEYTKLLGSSKEKKLLREEITKINRQLLKLKQEMEEITKKNSLFRLEYKMKIAFGFLFCEFDGNISKFKDEFDASNQEKIIQYHKNGEKYLTSFLKEEEKEKFNLEKMQKIIQKTEEEDWLLPETKNNLFKFYLLTYLLLPYELKGDFLGFVKKHYYDIKNVDFMDENQNNIQVSQTVEKQEDYFYHKIRLFEKNTKKYEIVKYSIVPNEKLKQYFEDLGIDIKYLTGSVESGEKWLGENLGIDIKYLTVEQKSEVSEEKNKKVSLKNNGMFNKTILLFVFKYYQIAFKLFNDIELYSLFFLREKSEKPFEVFLEELKDKMIGKQLNFGQLLYVVYEVLVKNKDLDKILSKKIDYRKDKSFSPEIAYLRNFLSHLNYSKFLDNFMKINTNKSDENKEVLIPSIKIQKMIQFIEKCNLQNQIDFDFNFVNDFYMRKEKMFFIQLKQIFPDINSTEKQKKSEKEEILRKRYHLINKKNEQIKDEHEAQSQLYEKILSLQKIFSCDKNNFYRRLKEEKLLFLEKQGKKKISMKEIKDKIASDISDLLGILKKEITRDIKDKLTEKFRYCEEKLLNISFYNHQDKKKEEGIRVFLIRDKNSDNFKFESILDDGSNKIFISKNGKEITIQCCDKVLETLMIEKNTLKISSNGKIISLIPHYSYSIDVKY

SEQ ID NO: 229 - protein, 668 aa, Fusobacterium necrophorum
MTEKKSIIFKNKSSVEIVKKDIFSQTPDNMIRNYKITLKISEKNPRVVEAEIEDLMNSTILKDGRRSARREKSMTERKLIEEKVAENYSLLANCPMEEVDSIKIYKIKRFLTYRSNMLLYFASINSFLCEGIKGKDNETEEIWHLKDNDVRKEKVKENFKNKLIQSTENYNSSLKNQIEEKEKLLRKESKKGAFYRTIIKKLQQERIKELSEKSLTEDCEKIIKLYSELRHPLMHYDYQYFENLFENKENSELTKNLNLDIFKSLPLVRKMKLNNKVNYLEDNDTLFVLQKTKKAKTLYQIYDALCEQKNGFNKFINDFFVSDGEENTVFKQIINEKFQSEMEFLEKRISESEKKNEKLKKKFDSMKAHFHNINSEDTKEAYFWDIHSSSNYKTKYNERKNLVNEYTELLGSSKEKKLLREEITQINRKLLKLKQEMEEITKKNSLFRLEYKMKIAFGFLFCEFDGNISKFKDEFDASNQEKIIQYHKNGEKYLTYFLKEEEKEKFNLEKMQKIIQKTEEEDWLLPETKNNLFKFYLLTYLLLPYELKGDFLGFVKKHYYDIKNVDFMDENQNNIQVSQTVEKQEDYFYHKIRLFEKNTKKYEIVKYSIVPNEKLKQYFEDLGIDIKYLTGSVESGEKWLGENLGIDIKYLTVEQKSEVSEEKIKKFL

SEQ ID NO: 230 - protein, 1121 aa, Fusobacterium perfoetens
MGKPNRSSIIKIIISNYDNKGIKEVKVRYNKQAQLDTFLIKSELKDGKFILYSIVDKAREKYRYSFEIDKTNINKNEILIIKKDIYSNKEDKVIRKYILSFEVSEKNDRTIVTKIKDCLETQKKEKFERENTRRLISETERKLLSEETQKTYSKIACCSPEDIDSVKIYKIKRYLAYRSNMLLFFSLINDIFVKGVVKDNGEEVGEIWRIIDSKEIDEKKTYDLLVENFKKRMSQEFINYKQSIENKIEKNTNKIKEIEQKLKKEKYKKEINRLKKQLIELNRENDLLEKDKIELSDEEIREDIEKILKIYSDLRHKLMHYNYQYFENLFENKKISKEKNEDVNLTELLDLNLFRYLPLVRQLKLENKTNYLEKEDKITVLGVSDSAIKYYSYYNFLCEQKNGFNNFINSFFSNDGEENKSFKEKINLSLEKEIEIMEKETNEKIKEINKNELQLMKEQKELGTAYVLDIHSLNDYKISHNERNKNVKLQNDIMNGNRDKNALDKINKKLVELKIKMDKITKRNSILRLKYKLQVAYGFLMEEYKGNIKKFKDEFDISKEKIKSYKSKGEKYLEVKSEKKYITKILNSIEDIHNITWLKNQEENNLFKFYVLTYILLPFEFRGDFLGFVKKHYYDIKNVEFLDENNDRLTPEQLEKMKNDSFFNKIRLFEKNSKKYDILKESILTSERIGKYFSLLNTGAKYFEYGGEENRGIFNKNIIIPIFKYYQIVLKLYNDVELAMLLTLSESDEKDINKIKELVTLKEKVSPKKIDYEKKYKFSVLLDCFNRIINLGKKDFLASEEVKEVAKTFTNLAYLRNKICHLNYSKFIDDLLTIDTNKSTTDSEGKLLINDRIRKLIKFIRENNQKMNISIDYNYINDYYMKKEKFIFGQRKQAKTIIDSGKKANKRNKAEELLKMYRVKKENINLIYELSKKLNELTKSELFLLDKKLLKDIDFTDVKIKNKSFFELKNDVKEVANIKQALQKHSSELIGIYKKEVIMAIKRSIVSKLIYDEEKVLSIIIYDKTNKKYEDFLLEIRRERDINKFQFLIDEKKEKLGYEKIIETKEKKKVVVKIQNNSELVSEPRIIKNKDKKKAKTPEEISKLGILDLTNHYCFNLKITL

SEQ ID NO: 231 - protein, 897 aa, Fusobacterium ulcerans
MENKGNNKKIDFDENYNILVAQIKEYFTKEIENYNNRIDNIIDKKELLKYSEKKEESEKNKKLEELNKLKSQKLKILTDEEIKADVIKIIKIFSDLRHSLMHYEYKYFENLFENKKNEELAELLNLNLFKNLTLLRQMKIENKTNYLEGREEFNIIGKNIKAKEVLGHYNLLAEQKNGFNNFINSFFVQDGTENLEFKKLIDEHFVNAKKRLERNIKKSKKLEKELEKMEQHYQRLNCAYVWDIHTSTTYKKLYNKRKSLIEEYNKQINEIKDKEVITAINVELLRIKKEMEEITKSNSLFRLKYKMQIAYAFLEIEFGGNIAKFKDEFDCSKMEEVQKYLKKGVKYLKYYKDKEAQKNYEFPFEEIFENKDTHNEEWLENTSENNLFKFYILTYLLLPMEFKGDFLGVVKKHYYDIKNVDFTDESEKELSQVQLDKMIGDSFFHKIRLFEKNTKRYEIIKYSILTSDEIKRYFRLLELDVPYFEYEKGTDEIGIFNKNIILTIFKYYQIIFRLYNDLEIHGLFNISSDLDKILRDLKSYGNKNINFREFLYVIKQNNNSSTEEEYRKIWENLEAKYLRLHLLTPEKEEIKTKTKEELEKLNEISNLRNGICHLNYKEIIEEILKTEISEKNKEATLNEKIRKVINFIKENELDKVELGFNFINDFFMKKEQFMFGQIKQVKEGNSDSITTERERKEKNNKKLKETYELNCDNLSEFYETSNNLRERANSSSLLEDSAFLKKIGLYKVKNNKVNSKVKDEEKRIENIKRKLLKDSSDIMGMYKAEVVKKLKEKLILIFKHDEEKRIYVTVYDTSKAVPENISKEILVKRNNSKEEYFFEDNNKKYVTEYYTLEITETNELKVIPAKKLEGKEFKTEKNKENKLMLNNHYCFNVKIIY

SEQ ID NO: 232 - protein, 1111 aa, Anaerosalibacter species
MKSGRREKAKSNKSSIVRVIISNFDDKQVKEIKVLYTKQGGIDVIKFKSTEKDEKGRMKFNFDCAYNRLEEEEFNSFGGKGKQSFFVTTNEDLTELHVTKRHKTTGEIIKDYTIQGKYTPIKQDRTKVTVSITDNKDHFDSNDLGDKIRLSRSLTQYTNRILLDADVMKNYREIVCSDSEKVDETINIDSQEIYKINRFLSYRSNMIIYYQMINNFLLHYDGEEDKGGNDSINLINEIWKYENKKNDEKEKIIERSYKSIEKSINQYILNHNTEVESGDKEKKIDISEERIKEDLKKTFILFSRLRHYMVHYNYKFYENLYSGKNFIIYNKDKSKSRRFSELLDLNIFKELSKIKLVKNRAVSNYLDKKTTIHVLNKNINAIKLLDIYRDICETKNGFNNFINNMMTISGEEDKEYKEMVTKHFNENMNKLSIYLENFKKHSDFKTNNKKKETYNLLKQELDEQKKLRLWFNAPYVYDIHSSKKYKELYVERKKYVDIHSKLIEAGINNDNKKKLNEINVKLCELNTEMKEMTKLNSKYRLQYKLQLAFGFILEEFNLDIDKFVSAFDKDNNLTISKFMEKRETYLSKSLDRRDNRFKKLIKDYKFRDTEDIFCSDRENNLVKLYILMYILLPVEIRGDFLGFVKKNYYDLKHVDFIDKRNNDNKDTFFHDLRLFEKNVKRLEVTSYSLSDGFLGKKSREKFGKELEKFIYKNVSIALPTNIDIKEFNKSLVLPMMKNYQIIFKLLNDIEISALFLIAKKEGNEGSITFKKVIDKVRKEDMNGNINFSQVMKMALNEKVNCQIRNSIAHINMKQLYIEPLNIYINNNQNKKTISEQMEEIIDICITKGLTGKELNKNIINDYYMKKEKLVFNLKLRKRNNLVSIDAQQKNMKEKSILNKYDLNYKDENLNIKEIILKVNDLNNKQKLLKETTEGESNYKNALSKDILLLNGIIRKNINFKIKEMILGIIQQNEYRYVNINIYDKIRKEDHNIDLKINNKYIEISCYENKSNESTDERINFKIKYMDLKVKNELLVPSCYEDIYIKKKIDLEIRYIENCKVVYIDIYYKKYNINLEFDGKTLFVKFNKDVKKNNQKVNLESNYIQNIKFIVS

SEQ ID NO: 233 - protein, 967 aa, Ruminococcus flavefaciens
MIEKKKSFAKGMGVKSTLVSGSKVYMTTFAEGSDARLEKIVEGDSIRSVNEGEAFSAEMADKNAGYKIGNAKFSHPKGYAVVANNPLYTGPVQQDMLGLKETLEKRYFGESADGNDNICIQVIHNILDIEKILAEYITNAAYAVNNISGLDKDIIGFGKFSTVYTYDEFKDPEHHRAAFNNNDKLINAIKAQYDEFDNFLDNPRLGYFGQAFFSKEGRNYIINYGNECYDILALLSGLRHWVVHNNEEESRISRTWLYNLDKNLDNEYISTLNYLYDRITNELTNSFSKNSAANVNYIAETLGINPAEFAEQYFRFSIMKEQKNLGFNITKLREVMLDRKDMSEIRKNHKVFDSIRTKVYTMMDFVIYRYYIEEDAKVAAANKSLPDNEKSLSEKDIFVINLRGSFNDDQKDALYYDEANRIWRKLENIMHNIKEFRGNKTREYKKKDAPRLPRILPAGRDVSAFSKLMYALTMFLDGKEINDLLTTLINKFDNIQSFLKVMPLIGVNAKFVEEYAFFKDSAKIADELRLIKSFARMGEPIADARRAMYIDAIRILGTNLSYDELKALADTFSLDENGNKLKKGKHGMRNFIINNVISNKRFHYLIRYGDPAHLHEIAKNEAVVKFVLGRIADIQKKQGQNGKNQIDRYYETCIGKDKGKSVSEKVDALTKIITGMNYDQFDKKRSVIEDTGRENAEREKFKKIISLYLTVIYHILKNIVNINARYVIGFHCVERDAQLYKEKGYDINLKKLEEKGFSSVTKLCAGIDETAPDKRKDVEKEMAERAKESIDSLESANPKLYANYIKYSDEKKAEEFTRQINREKAKTALNAYLRNTKWNVIIREDLLRIDNKTCTLFRNKAVHLEVARYVHAYINDIAEVNSYFQLYHYIMQRIIMNERYEKSSGKVSEYFDAVNDEKKYNDRLLKLLCVPFGYCIPRFKNLSIEALFDRNEAAKFDKEKKKVSGNS

SEQ ID NO: 234 - protein, 946 aa, Anaerobic digester metagenome
MNNKRKTKAKAAGLKSVFFDQKQAVLTTFAKGNNSQIEKKVVNSEVKDLRQPPAFDLELKEKTFYISGKNNINTSRENPLASASLPLSKRQRIRAERIKRAREENRPYHNVKRVGEDDLRAKADLEKHYFGKEYSDNLKIQIIYNILDINKIISPYINDIVYSMNNLARNDEYIDGKIDVIGSLSSTTDYSSFMSPNKDLEKEKKFSFHRENYKKFVEASKPYMRYYGKVFIRDVKKSKLSTGKGEKIEVMYRSDEEIFTIFQILSYVRQSIMHNDIGNKSSILAIEKYPARFVGFLSDLLKTKTNDVNRMFIDNNSQTNFWVLFSIFGLQDHTSGADKICRNFYDFVIKADSKNLGFSLKKIRELMLDLPNANMLRDHQFDTVRSKFYTLLDFIIYQHYLEEKSRIDNMVEKLRMTLKEEEKEVLYAAEAKIVWNAIGAKVINKLVPMMNGDALKEIKRKNRDRKLPQSVIATVQVNSDANVFSGLIYFLTLFLDGKEINEMVSNLITKFENIDSLLHVDREIYKSDEKDLDLEIEKLALFFKGVVRPNAKTDTGAGEISKSFSIFQSAERIIEELKFIKNVTRMDNEIFPSEGVFLDAANVLGVRGDDFDFSNEFVGDDLHSDANKKIINKINGTKEDRNLRNFIINNVVKSRRFQYIARHMNTHYVKQLANNETLNRFVLNKMGDAKIINRYYESISGNTPNIEVRSQIDYLVKRLRSFSFEDLNDVKQKVRPGTNESIEKEKKKALVGLCLTIQYLVYKNLVNINARYTTAFYCLERDSKLKGFGVDVWRDFESYTALTNHFIKEGYLPVRKAEILRANLKHLDCEDGFKYYRNQVTHLNAIRVAYKYINEIKSVHSYFALYHYIMQRHLYDSLQAKAKDSSGFVIDALKKSFEHKIYSKDLLHVLHSPFGYNTARYKNLSIEALFDKNESRPEVNPLSTND

SEQ ID NO: 235 - protein, 919 aa, Ruminococcus species
MAKKNKMKPRELREAQKKARQLKAAEINNNAAPAIAAMPAAEVIAPAAEKKKSSVKAAGMKSILVSENKMYITSFGKGNSAVLEYEVDNNDYNQTQLSSKDNSNIQLGGVNEVNITFSSKHGFESGVEINTSNPTHRSGESSPVRGDMLGLKSELEKRFFGKTFDDNIHIQLIYNILDIEKILAVYVTNIVYALNNMLGVKGSESHDDFIGYLSTNNIYDVFIDPDNSSLSDDKKANVRKSLSKFNALLKTKRLGYFGLEEPKTKDNRVSQAYKKRVYHMLAIVGQIRQCVFHDKSGAKRFDLYSFINNIDPEYRDTLDYLVEERLKSINKDFIEDNKVNISLLIDMMKGYEADDIIRLYYDFIVLKSQKNLGFSIKKLREKMLDEYGFRFKDKQYDSVRSKMYKLMDFLLFCNYYRNDIAAGESLVRKLRFSMTDDEKEGIYADEAAKLWGKFRNDFENIADHMNGDVIKELGKADMDFDEKILDSEKKNASDLLYFSKMIYMLTYFLDGKEINDLLTTLISKFDNIKEFLKIMKSSAVDVECELTAGYKLFNDSQRITNELFIVKNIASMRKPAASAKLTMFRDALTILGIDDKITDDRISGILKLKEKGKGIHGLRNFITNNVIESSRFVYLIKYANAQKIREVAKNEKVVMFVLGGIPDTQIERYYKSCVEFPDMNSSLGVKRSELARMIKNISFDDFKNVKQQAKGRENVAKERAKAVIGLYLTVMYLLVKNLVNVNARYVIAIHCLERDFGLYKEIIPELASKNLKNDYRILSQTLCELCDKSPNLFLKKNERLRKCVEVDINNADSSMTRKYRNCIAHLTVVRELKEYIGDICTVDSYFSIYHYVMQRCITKRENDTKQEEKIKYEDDLLKNHGYTKDFVKALNSPFGYNIPRFKNLSIEQLFDRNEYLTEK

SEQ ID NO: 236 - protein, 906 aa, Unknown
  Synthetic
MEREVKKPPKKSLAKAAGLKSTFVISPQEKELAMTAFGRGNDALLQKRIVDGVVRDVAGEKQQFQVQRQDESRFRLQNSRLADRTVTADDPLHRAETPRRQPLGAGMDQLRRKAILEQKYFGRTFDDNIHIQLIYNILDIHKMLAVPANHIVHTLNLLGGYGETDFVGMLPAGLPYDKLRVVKKKNGDTVDIKADIAAYAKRPQLAYLGAAFYDVTPGKSKRDAARGRVKREQDVYAILSLMSLLRQFCAHDSVRIWGQNTTAALYHLQALPQDMKDLLDDGWRRALGGVNDHFLDTNKVNLLTLFEYYGAETKQARVALTQDFYRFVVLKEQKNMGFSLRRLREELLKLPDAAYLTGQEYDSVRQKLYMLLDFLLCRLYAQERADRCEELVSALRCALSDEEKDTVYQAEAAALWQALGDTLRRKLLPLLKGKKLQDKDKKKSDELGLSRDVLDGVLFRPAQQGSRANADYFCRLMHLSTWFMDGKEINTLLTTLISKLENIDSLRSVLESMGLAYSFVPAYAMFDHSRYIAGQLRVVNNIARMRKPAIGAKREMYRAAVVLLGVDSPEAAAAITDDLLQIDPETGKVRPRSDSARDTGLRNFIANNVVESRRFTYLLRYMTPEQARVLAQNEKLIAFVLSTVPDTQLERYCRTCGREDITGRPAQIRYLTAQIMGVRYESFTDVEQRGRGDNPKKERYKALIGLYLTVLYLAVKNMVNCNARYVIAFYCRDRDTALYQKEVCWYDLEEDKKSGKQRQVEDYTALTRYFVSQGYLNRHACGYLRSNMNGISNSLLTAYRNAVDHLNAIPPLGSLCRDIGRVDSYFALYHYAVQQYLNGRYYRKTPREQELFAAMAQHRTWCSDLVKALNTPFGYNLARYKNLSIDGLFDREGDHVVREDGEKPAE

SEQ ID NO: 237 - protein, 933 aa, Ruminococcus flavefaciens
MKKKMSLREKREAEKQAKKAAYSAASKNTDSKPAEKKAETPKPAEIISDNSRNKTAVKAAGLKSTIISGDKLYMTSFGKGNAAVIEQKIDINDYSFSAMKDTPSLEVDKAESKEISFSSHHPFVKNDKLTTYNPLYGGKDNPEKPVGRDMLGLKDKLEERYFGCTFNDNLHIQIIYNILDIEKILAVHSANITTALDHMVDEDDEKYLNSDYIGYMNTINTYDVFMDPSKNSSLSPKDRKNIDNSRAKFEKLLSTKRLGYFGFDYDANGKDKKKNEEIKKRLYHLTAFAGQLRQWSFHSAGNYPRTWLYKLDSLDKEYLDTLDHYFDKRFNDINDDFVTKNATNLYILKEVFPEANFKDIADLYYDFIVIKSHKNMGFSIKKLREKMLECDGADRIKEQDMDSVRSKLYKLIDFCIFKYYHEFPELSEKNVDILRAAVSDTKKDNLYSDEAARLWSIFKEKFLGFCDKIVVWVTGEHEKDITSVIDKDAYRNRSNVSYFSKLMYAMCFFLDGKEINDLLTTLINKFDNIANQIKTAKELGINTAFVKNYDFFNHSEKYVDELNIVKNIARMKKPSSNAKKAMYHDALTILGIPEDMDEKALDEELDLILEKKTDPVTGKPLKGKNPLRNFIANNVIENSRFIYLIKFCNPENVRKIVNNTKVTEFVLKRIPDAQIERYYKSCTDSEMNPPTEKKITELAGKLKDMNFGNFRNVRQSAKENMEKERFKAVIGLYLTVVYRVVKNLVDVNSRYIMAFHSLERDSQLYNVSVDNDYLALTDTLVKEGDNSRSRYLAGNKRLRDCVKQDIDNAKKWFVSDKYNSITKYRNNVAHLTAVRNCAEFIGDITKIDSYFALYHYLIQRQLAKGLDHERSGFDRNYPQYAPLFKWHTYVKDVVKALNAPFGYNIPRFKNLSIDALFDRNEIKKNDGEKKSDD

SEQ ID NO: 238 - protein, 944 aa, Ruminococcus species
MAKKSKGMSLREKRELEKQKRIQKAAVNSVNDTPEKTEEANVVSVNVRTSAENKHSKKSAAKALGLKSGLVIGDELYLTSFGRGNEAKLEKKISGDTVEKLGIGAFEVAERDESTLTLESGRIKDKTARPKDPRHITVDTQGKFKEDMLGIRSVLEKKIFGKTFDDNIHVQLAYNILDVEKIMAQYVSDIVYMLHNTDKTERNDNLMGYMSIRNTYKTFCDTSNLPDDTKQKVENQKREFDKIIKSGRLGYFGEAFMVNSGNSTKLRPEKEIYHIFALMASLRQSYFHGYVKDTDYQGTTWAYTLEDKLKGPSHEFRETIDKIFDEGFSKISKDFGKMNKVNLQILEQMIGELYGSIERQNLTCDYYDFIQLKKHKYLGFSIKRLRETMLETTPAECYKAECYNSERQKLYKLIDFLIYDLYYNRKPARIEEIVDKLRESVNDEEKESIYSVEAKYVYESLSKVLDKSLKNSVSGETIKDLQKRYDDETANRIWDISQHSISGNVNCFCKLIYIMTLMLDGKEINDLLTTLVNKFDNIASFIDVMDELGLEHSFTDNYKMFADSKAICLDLQFINSFARMSKIDDEKSKRQLFRDALVILDIGNKDETWINNYLDSDIFKLDKEGNKLKGARHDFRNFIANNVIKSSRFKYLVKYSSADGMIKLKTNEKLIGFVLDKLPETQIDRYYESCGLDNAVVDKKVRIEKLSGLIRDMKFDDFSGVKTSNKAGDNDKQDKAKYQAIISLYLMVLYQIVKNMIYVNSRYVIAFHCLERDFGMYGKDFGKYYQGCRKLTDHFIEEKYMKEGKLGCNKKVGRYLKNNISCCTDGLINTYRNQVDHFAVVRKIGNYAAYIKSIGSWFELYHYVIQRIVFDEYRFALNNTESNYKNSIIKHHTYCKDMVKALNTPFGYDLPRYKNLSIGDLFDRNNYLNKTKESIDANSSIDSQ

SEQ ID NO: 239 - protein, 954 aa, Eubacterium siraeum
MGKKIHARDLREQRKTDRTEKFADQNKKREAERAVPKKDAAVSVKSVSSVSSKKDNVTKSMAKAAGVKSVFAVGNTVYMTSFGRGNDAVLEQKIVDTSHEPLNIDDPAYQLNVVTMNGYSVTGHRGETVSAVTDNPLRRFNGRKKDEPEQSVPTDMLCLKPTLEKKFFGKEFDDNIHIQLIYNILDIEKILAVYSTNAIYALNNMSADENIENSDFFMKRTTDETFDDFEKKKESTNSREKADFDAFEKFIGNYRLAYFADAFYVNKKNPKGKAKNVLREDKELYSVLTLIGKLRHWCVHSEEGRAEFWLYKLDELKDDFKNVLDVVYNRPVEEINNRFIENNKVNIQILGSVYKNTDIAELVRSYYEFLITKKYKNMGFSIKKLRESMLEGKGYADKEYDSVRNKLYQMTDFILYTGYINEDSDRADDLVNTLRSSLKEDDKTTVYCKEADYLWKKYRESIREVADALDGDNIKKLSKSNIEIQEDKLRKCFISYADSVSEFTKLIYLLTRFLSGKEINDLVTTLINKFDNIRSFLEIMDELGLDRTFTAEYSFFEGSTKYLAELVELNSFVKSCSFDINAKRTMYRDALDILGIESDKTEEDIEKMIDNILQIDANGDKKLKKNNGLRNFIASNVIDSNRFKYLVRYGNPKKIRETAKCKPAVRFVLNEIPDAQIERYYEACCPKNTALCSANKRREKLADMIAEIKFENFSDAGNYQKANVTSRTSEAEIKRKNQAIIRLYLTVMYIMLKNLVNVNARYVIAFHCVERDTKLYAESGLEVGNIEKNKTNLTMAVMGVKLENGIIKTEFDKSFAENAANRYLRNARWYKLILDNLKKSERAVVNEFRNTVCHLNAIRNININIKEIKEVENYFALYHYLIQKHLENRFADKKVERDTGDFISKLEEHKTYCKDFVKAYCTPFGYNLVRYKNLTIDGLFDKNYPGKDDSDEQK

SEQ ID NO: 240 - protein, 12 aa, Artificial Sequence
  Synthetic Peptide
FWYHKMILVAGC

SEQ ID NO: 241 - protein, 12 aa, Artificial Sequence
  Synthetic Peptide
WYHKREDCSTNQ

SEQ ID NO: 242 - protein, 9 aa, Artificial Sequence
  Synthetic Peptide
VCAGSPTND

SEQ ID NO: 243 - protein, 229 aa, Rattus rattus [sequence omitted]

SEQ ID NO: 244 - protein, 236 aa, Homo sapiens
MTSEKGPSTGDPTLRRRIEPWEFDVFYDPRELRKEACLLYEIKWGMSRKIWRSSGKNTTNHVEVNFIKKFTSERDFHPSMSCSITWFLSWSPCWECSQAIREFLSRHPGVTLVIYVARLFWHMDQQNRQGLRDLVNSGVTIQIMRASEYYHCWRNFVNYPPGDEAHWPQYPPLWMMLYALELHCIILSLPPCLKISRRWQNHLTFFRLHLQNCHYQTIPPHILLATGLIHPSVAWR

SEQ ID NO: 245 - protein, 325 aa, Homo sapiens
MELKYHPEMRFFHWFSKWRKLHRDQEYEVTWYISWSPCTKCTRDMATFLAEDPKVTLTIFVARLYYFWDPDYQEALRSLCQKRDGPRATMKIMNYDEFQHCWSKFVYSQRELFEPWNNLPKYYILLHIMLGEILRHSMDPPTFTFNFNNEPWVRGRHETYLCYEVERMHNDTWVLLNQRRGFLCNQAPHKHGFLEGRHAELCFLDVIPFWKLDLDQDYRVTCFTSWSPCFSCAQEMAKFISKNKHVSLCIFTARIYDDQGRCQEGLRTLAEAGAKISIMTYSEFKHCWDTFVDHQGCPFQPWDGLDEHSQDLSGRLRAILQNQEN

SEQ ID NO: 246 - protein, 208 aa, Petromyzon marinus
MTDAEYVRIHEKLDIYTFKKQFFNNKKSVSHRCYVLFELKRRGERRACFWGYAVNKPQSGTERGIHAEIFSIRKVEEYLRDNPGQFTINWYSSWSPCADCAEKILEWYNQELRGNGHTLKIWACKLYYEKNARNQIGLWNLRDNGVGLNVMVSEHYQCCRKIFIQSSHNQLNENRWLEKTLKRAEKRRSELSIMIQVKILHTTKSPAV

SEQ ID NO: 247 - protein, 200 aa, Homo sapiens
MDSLLMNRRKFLYQFKNVRWAKGRRETYLCYVVKRRDSATSFSLDFGYLRNKNGCHVELLFLRYISDWDLDPGRCYRVTWFTSWSPCYDCARHVADFLRGNPYLSLRIFTARLYFCEDRKAEPEGLRRLHRAGVQIAIMTFKDYFYCWNTFVENHERTFKAWEGLHENSVRLSRQLRRILLPLYEVDDLRDAFRTLGLLD

SEQ ID NO: 248 - protein, 181 aa, Homo sapiens
MDSLLMNRRKFLYQFKNVRWAKGRRETYLCYVVKRRDSATSFSLDFGYLRNKNGCHVELLFLRYISDWDLDPGRCYRVTWFTSWSPCYDCARHVADFLRGNPNLSLRIFTARLYFCEDRKAEPEGLRRLHRAGVQIAIMTFKDYFYCWNTFVENHERTFKAWEGLHENSVRLSRQLRRILL

SEQ ID NO: 249 - protein, 9 aa, Artificial Sequence
  Synthetic Peptide
GGSGGSGGS

SEQ ID NO: 250 - protein, 25 aa, Artificial Sequence
  Synthetic Peptide
GGGGSGGGGSGGGGSGGGGSGGGGS

SEQ ID NO: 251 - protein, 30 aa, Artificial Sequence
  Synthetic Peptide
GGGGSGGGGSGGGGSGGGGSGGGGSGGGGS

SEQ ID NO: 252 - protein, 35 aa, Artificial Sequence
  Synthetic Peptide
GGGGSGGGGSGGGGSGGGGSGGGGSGGGGSGGGGS

SEQ ID NO: 253 - protein, 45 aa, Artificial Sequence
  Synthetic Peptide
GGGGSGGGGSGGGGSGGGGSGGGGSGGGGSGGGGSGGGGSGGGGS

SEQ ID NO: 254 - protein, 60 aa, Artificial Sequence
  Synthetic Peptide
GGGGSGGGGSGGGGSGGGGSGGGGSGGGGSGGGGSGGGGSGGGGSGGGGSGGGGSGGGGS

SEQ ID NO: 255 - protein, 5 aa, Artificial Sequence
  Synthetic Peptide
GGGGS

SEQ ID NO: 256 - protein, 10 aa, Artificial Sequence
  Synthetic Peptide
GGGGSGGGGS

SEQ ID NO: 257 - protein, 20 aa, Artificial Sequence
  Synthetic Peptide
GGGGSGGGGSGGGGSGGGGS

SEQ ID NO: 258 - protein, 40 aa, Artificial Sequence
  Synthetic Peptide
GGGGSGGGGSGGGGSGGGGSGGGGSGGGGSGGGGSGGGGS

SEQ ID NO: 259 - protein, 50 aa, Artificial Sequence
  Synthetic Peptide
GGGGSGGGGSGGGGSGGGGSGGGGSGGGGSGGGGSGGGGSGGGGSGGGGS

SEQ ID NO: 260 - protein, 55 aa, Artificial Sequence
  Synthetic Peptide
GGGGSGGGGSGGGGSGGGGSGGGGSGGGGSGGGGSGGGGSGGGGSGGGGSGGGGS

SEQ ID NO: 261 - protein, 32 aa, Artificial Sequence
  Synthetic Peptide
LEPGEKPYKCPECGKSFSQSGALTRHQRTHTR

SEQ ID NO: 262 - protein, 20 aa, Artificial Sequence
  Synthetic Peptide
PKKKRKVEASSPKKRKVEAS

SEQ ID NO: 263 - DNA, 9 bp, Artificial Sequence
  Synthetic Oligonucleotide
ggtggtagt

SEQ ID NO: 264 - DNA, 27 bp, Artificial Sequence
  Synthetic Oligonucleotide
ggtggtagtggagggagcggcggttca

SEQ ID NO: 265 - DNA, 72 bp, Artificial Sequence
  Synthetic Oligonucleotide
ggtggaggaggctctggtggaggcggtagcggaggcggagggtcgggtggtagtggagggagcggcggttca

SEQ ID NO: 266 - DNA, 48 bp, Artificial Sequence
  Synthetic Oligonucleotide
tcgggatctgagacgcctgggacctcggaatcggctacgcccgaaagt

SEQ ID NO: 267 - DNA, 192 bp, Artificial Sequence
  Synthetic Oligonucleotide
gtggataacaaatttaacaaagaaatgtgggcggcgtgggaagaaattcgtaacctgccgaacctgaacggctggcagatgaccgcgtttattgcgagcctggtggatgatccgagccagagcgcgaacctgctggcggaagcgaaaaaactgaacgatgcgcaggcgccgaaaaccggcggtggttctggt

SEQ ID NO: 268 - DNA, 108 bp, Artificial Sequence
  Synthetic Oligonucleotide
ggtggttctgccggtggctccggttctggctccagcggtggcagctctggtgcgtccggcacgggtactgcgggtggcactggcagcggttccggtactggctctggc

SEQ ID NO: 269 - protein, 12 aa, Artificial Sequence
  Synthetic Peptide
FWYHKMILVAGC

SEQ ID NO: 270 - protein, 12 aa, Artificial Sequence
  Synthetic Peptide
WYHKREDCSTNQ

SEQ ID NO: 271 - protein, 9 aa, Artificial Sequence
  Synthetic Peptide
VCAGSPTND

SEQ ID NO: 272 - protein, 849 aa, Artificial Sequence; identical to SEQ ID NO: 62
  Synthetic Peptide

SEQ ID NO: 273 - protein, 802 aa, Artificial Sequence
  Synthetic Peptide
MQVENIKKGSSQGMYSIEQYEGAKKWCFAIVLNRAQTNLQGNPKLFEETLTRFERIRKEDWFDQETKKLIYAKQEQNEVEEEIQKAADEKLRDLRNYFSHYFHTPDCLIFTQNDPVRIIMEKAYEKARFEQAKKEQEDISIEFGELFEENGRITSAGVVFFASFFAERRFLNRLMGYVQGFTRTEGEYKITRDVFSTYCLRDSYSVKTPDHDAVMFRDILGYLSRVPSESYQRIKESQMRSETQLSERKTDKFILFALNYLEDYGLEDLADYTACFARTRIKREQDENTDGKEQKPHRKKPRVEIHFERAEGDPFYIKHNNVILRTQKKGAQTYIFRMGVYELKYLVLLSLLGKGAEAVKRIDRYVHSLRNQLPHIEKKSTEEIEGYVRFLPRFVRSHLGLLGVDDEKKIKARVDYVKAKWLEKKEKSRELQLHRKGRDILRYINERCERPLNIDEYNRILELLVTKHLDGFYRELEELKKTRRIDKNIVCNLSRHKSVNALHEKVCDLVVQELESLGREELKEYVGLIPKEEKEVSFEEKTDRVVKQPVIYKGFLRNEFFRESRKSFARLVEEAVREKGEVYDVPLGGEYYEIVSLDTFDKDNKRLYETLAMDRLLLMIARQYHLSLNKELAKRAQQIEWKKEDGEEVIIFTLKNPAQPEQSCSVRFSLRDYTKLYVMDDAEFLARLCDYFLPKDEEQIDYHRLYTQGMNRYTNLQREGIEAILELEKKTIGPEQPRPPKNYIPFSEIMDKSAYNEDDQKALRRVRNALLHHNLNFARADFKRFCGIMKREGIEKRWSLAV

SEQ ID NO: 274 - protein, 775 aa, Artificial Sequence; identical to SEQ ID NO: 48
  Synthetic Peptide

SEQ ID NO: 275 - DNA, 8604 bp, Artificial Sequence
  Synthetic Oligonucleotide
agctgtcccgctgagcttattaacaagcattaccgctaaattttccgcggactgttggttttcagcttcgtgaatgccaacaacaaaaggccctgtcgaaagcacaatttcggtggtgtcatagaaatccaggactttgccttcgagggttttattggttgccttctttgctgtggcgccattttcaatcagaaagctgcgatagctttctgcgactgcctcggcatctttgggaccggagcgtttgctcagaaatgccgtgatggtttcaccgttaagctggtatccggcagcgaagatgtcagtcaatccttcaaagccaaatgcacttgccagataaagcttaatgcttcctgggaccaaattatcctttggcaggtgctcgatttcaggtatagcggtatcatcgtgaacggccaggttcgtgggaattttccttgcgacttccgccattgccgcaaacagctcatccgattcggcgaagccgaccagctcgatataatattggccgtgcgcaagataaaacgcattactggttttgtatgcaaattgcatatccggcaggttctcaacttcgggccttttttgcacgctgtaaaccgagaatgcgtttctggttctggccatatcaaagatatagagctccatcaccaggttttcatccgcctggcttacaaatctctgggtggacaattttataaaaccagcgtcgatataaaggggggccttgccgttaatcttttcgtaaagattttcggtggtgtagacttcaatttctgaaagcgttttgaatccgtaaggcagaagaaaagtcaggtctttcttttgttttggcatctgctttatgaataccccaacggcgataagtaagagaatcgctaataagcagatgcctataacagattcgagacgttttgcccggcttggtaccgaacccataaccaactccagtaatgacaaattacttgactttataaccgggctggattataatttttgccggtgttgctgtcaaccccaaatgctacaggtgaaaaaggcgaagatagatttctaacgaggttgacaaagcaggtcagggcgtgttataataggttgctaaagtaaaaaggagactgaaatgattgaatatgcacaatatttggggttttggacgccgggcccccttgaaattgctgttattgcgattgtcgctcttctgatattcggcagacggctgcctgaaatcgcccgcaacgtaggcaagagcctgactgaattcaagaaggggcttcacgaggccaaggagaccaaggacgaattggtggatgatgtccgggaagtcaaggatgatgtggtaagagaggcgaaggatgccgccgggctgaatgaagaggatacaatgggctctgattgattattgataaaggggaactaatcactgagaacaattgtcaatcattaatcaacaatcaatattgaagatccgcctgtggcggaatcaatttttaagatgggcgatacaaagaagaaagaggacctccttgattccactatgagtctgggcgaccaccttgaggaattgcggatgcggctgattcgcgcgctggtgggcctggcgttagctcttattatctgtctgatcttcggcaagctgctgatatcatttattcaaaaaccttacgttgctgtgatgggtgaagaggctactctgaagacgcttgccccggcccaagggattaacagctacgtaaaaatagccttggtctcaggcttgatattctcatcgccctgggtcttctaccagttatggatgttcgtggctgcaggactctatcctaatgaaaaaagatatgtgtatgtagcagtacctttttcggtggtattatttgttgccggagctttgtttttcatctttgtagtggcagaagtgtctcttgctttcttaataaaggtcgacaggtggctcggactggaacccgactggactttcccgaagtatgtgacctttgtaaccaccctgatgctggtatttggtgttgcgtttcagaccccgatagctattttctttttgaacaagacaggtctggtttcagtccaggcgttacggcggtcaagaaaatatgtactgctacttatcgttgtagtagcagctatggcgactccgcctgatgtggtttctcaagtaacactggcgataccgttgtatgtgctgtttgaattaggcatactgctgagttactttgcagaactaaaaaagagaaagtcgaaaaacaaccagtgataagccgacaatccccagctttcccagtaccgactacttgtttctttcgggcctggtttttatttcgtcaatcgagcgactaagaaatcttcaaaggcgcttaaatccttccataccgtggcacagttaatggttttggctttgttatctattacggtgtatccatagtcggtaacccgaatgccgagtttttcgggctcattttagacatttgcatctatgccgccggcagcgctgaaggttttttcggagctaattgagtattcagcataaatgttgaacggttttgccaatgcgggtactatgatgttgatgctaacgttgataaatacaaatgtgatggtccctcccatagggcctgtcggcctggactatatcgcaggagccgtcagggcagccgggaaccaggcagacgtagttgatttatgtcttgctgatgacccgtcaaagactctccagggctatttcgctacgcacagcccgcaattggtgggggtctcttttcgcaatgtggacgattctttctggccaagcgcccggtggttcgtccccgacctggctgacactatccgtacgatacgaagtatgacggatgcaccaattgtagttggcggcgttggcttttccattttttccgagcgaatcgtcgaatataccggcgctgactttgggattcggggcgacggagagcaggcaatagtttcacttcttaatcagctgcagcggccggaacggcttgaacgcatagatgggttagtccggcggcgcgacggagttattcacagcaaccgaccagcgtggcctgcaccgctttctttgcgcaccgaacgtgatgcgattgataacctcgcttacttcaaaaaaggagggcagtgtggtgtggagaccaaacggggctgtaaccgccgatgcctatattgtgccgacccgctggctaagggtgcggcagtcaggccgagggccccgtcggaggtcgccgatgaggtccagtctctaataggcaagggaatagaagtattgcatttgtgcgactctgagttcaacatctctcaaagccacgcctatgcggtctgcgaagagttcagccgtcgctcatttgcgaaaaaggtgcgctggtacacatatatggcggtggtgccattcgatgccgagcttgccggggctatgagcagagcgggctgtgtcggtatcgactttaccggcgactctgcgtgcccatcaattctaaagacctatcgccagcggcatcataaagaagaccttgcctcggcggtgcgtttgtgccgtgctaacggcataacggttatgatagacctgctgtttggcggcccgggtgaaacgccggaaacggtcgcagagacaatagatttcattaagcaaattgacccggattgcgcaggggctccgctcggtataagaatctaccccggcaccgaaatggcccgaatagtggcaaacgaaggcccaccggaaacgaacccgaacgttcaccgaaagtacgaggggcctgtggatttcttcaaaccaacttactatatatctgaagccctcggtgagcagccggccgggcttatcaaggatttgatttcggcagatgaaagattctttgagccgatgccggaaatagccccggaggctctaaaaagtagccagtccaccgaccacaattacaatgataataccgaacttgtagaagcaatcagcaaaggtgcacgcggggcatattgggatatactgcgcaagcttcgctgcgactaagcagcttatggtagtagatgattcccgcctgcgggagattggcccgaatcctgaggaatttgttagaagcggatgcaatgttgatttttggggtaaaaacgggggcagggggatttggtccccggtttgaggattccgagaagcccacccgtagggatctccgctcccttagggataaattcgcttcgagtttgaaattggtccccggtttgaggattccgagaagctcacccgtagtgatctccgcttcgcttcggctttgtttgggtttgttttccccgcgtctgcgaagtggttcattttcataatcctttataacatataagtttacgttcattttgggctttcggcaaattgggtttgaattgggtttgtttttttggactgcgaaatcatctttttttctgtaaacctttgttataagagagtttacattcatttgggcatttagtaaattgggtttgattggctttgaattgggtttgttttcaccaagtgtccaattggatttattttcataatcctttgtattatatggatttacgttcatttgagcatccagaaaattggctttgttttgcataaaaagggctgatttgtagaggactctttacagttgtagagggcaagttagttaagagtgagctaaagtgcctaaagtgaactaaagttggattctcgattctcgtatagcgtatagcgtatttcacggttattcaccattcattaaggaataaatttgattaggcctgctggcccctccggcgattagtaaatggttctcggcggcaaaacaacgcgcctctataattgggcgaacatgcacgtttgagtcgaaaattggtgctttcttgacaggataaacaggagtaactcgttgtgagaaaaggagtaaaattttttttcaattttccgattttaggttccaactacctgcacttttgattgaaaaatcacaaatgtcttgcctattttaacgcagtttttcgtcgaaacgtcagcgaactaggaaaataggcgatttctgggggaaaacaaataaaaaatgcacaaaagtgacaaaaaaacggccaaaaaagtgctttttttggctgcctttaccccgtgagatgatttaccaaaccttcctctgctattcctatgcaagtttgctcagggctggtgtgaatactataaaaatttgtgctgtaatcactccacaaatcggaggcttcttcagcgtggaaattctggaggccaaaatgaaatacgctgtaatcaccccacaaatcggaggcttcttcagcttcactacctctcaaatcgcccaactatacgctgtaatcaccccacaaatcggaggcttcttcagctcgcaagtcccgtccacgcacaaagtttgagctgtaatcaccccacaaatcggaggcttcttcagcatgagcttttggttgtgctggatatgccagctgtaatcaccccacaaatcggaggcttcttcagcacaaaacggttcaacaaggtcgaagaactagctgtaatcaccccacaaatcggaggcttcttcagcttctgcggagtctttcgccggtgttcaaatgctgtaatcaccccacaaatcggaggcttcttcagcctatcctttataatacattttcctatatagatttacaatacaaaacccacgacaaaactgacttcttcttttgaatcatgccgtattataacacttttttacactatcaaagaccactttttttctattccttctcttttcacgaccccatagaatctcttcagatgttccctctcaaaattgagattatagtgcaaaagcgcatttcgcacccgctttaaagcaacctgttgatcattattataaccgcttctattcattatctcctgaaattctatataattttttgctggtttaatctttcttcgttcgataatccttccttcaagctttagtattgcatcgattccctctttttgaaggtttgtatatttgtcgaacgcccttgcatagtgcttatggtagtctatttcttttgcttcttttgggataaaatattcccaaagtctgcttaaaaattcaggatcgtccattacatacatctttgtataatccaagatcgaaaagcgtatcgaaaaactcttcttttgctcttttggattttggaatttgaaaataatcacttctctgccatcttccttcttccaatagatatgctgtgccttttctgcaagtttttcgttcaatctgagataatattgccttgccatcataaggcaaagtctgtccattgccagtgtttcatatagcttcttgtttgttctgtcaaatcgatcaagagatgggatgttataatactcttcaccaagaggaatatcaaaatccgaccactttgtcttaattgcttcttcaacaagtctggcaaaactctttttgtcttctttgaagaattcgtatctcaaaaatcccttataaacaaccggctgttccaaaatcctatctaccttttctctaaaagttacctctttttcttctttaggtatcagcccaatatattccttgagattctccgattgcaaactgcccagttcttgtagaaccaaatcacataccctttcatgaagtgcattgagcgttgtatgcccggaaagcttctggataatatttttgtctaatcgtctggttcttttcagttcttcaagttcattataaaatccggcgaagtctttgttcactataaactttaaaatattattatattccttcctgctaagtggcctatcgcatcgctcgttgatatatctgagtatatcccttccttttcgatgtagttcaagcttcctcgatccctcttttttatccgtccacttggccttaacatattccaatcgagtctttaaccttttctcatcatcaacctgtaaaagacctagtcttgaacgtacgaatcttggaaggaagtttatagatttttgaatctcctcattacttattttatctaaataaggcaactgcttctttaaactactaatatagcggtcaattctttgaattgcctcttcggcttttcccaatagactcaaaagaacaagatatttaagttcataaactcccatcctgaatacgttggactgtccaccttttttttgagccttcagaataacattatttcgtttaatataaaattggtcttgcttctctttgtcaaaatgaatctcgactaccggcttttccctgtgaaatttgtgtttgttaccatctgtctctttcgtatcttcgttctcccttttaattttacttcttgcaaaacatgctgtgtagtctgccaaatccttaagtccataatcctcaagatatttcagtgcaaataatatgaacttgtccgtctttctttcgctcaactgatcctggcttctctttcgagttagtttgatatgctgatatatctcagtgggaactcgggacaggtatccgagaatatccctgaacataactgcatcatggtcctgcgcctgaaccgaataactatccttaagacaatatttggaaaaaacttgccgtgttatattatattcaccctctgtttttctaaacccttggacatatcccattaagcgatttaaaaatcttctttcaataaaaaatgagacaaagaatactacacctgctgatgttatcttatcttcttcttcaaataactctggaaattcaatcgaaatatcttcttgttgttttttcttcgcttcaaaacggctcttttcgtatgctttttccataattatccttatggtgtcatttcgattgaatatcaggcagtcaggcgcgtgaagataatgtgagaaataattccttaaattctttagtctttcactggccgctatttgaatttcttcttttactttgttttcctcttctttttcataaatcagtttttttgtttcctcattaaaccaatcctgtttcatgattttttcaaatcttgtaagtgtttgctcaaataactttggattttcctctaaatttgtttgtgctctattaagaactattgcaaaacaccactttttttctccttcatattgctcgatagaatacacttctttattgcttgttttttttatattttcaaactccatatttttaatccccgatcttcttactaatataaagtcaaagtggtgcgaaatatcgcaccctaccctctgcctgcgcaggaaagaccaacggacgattcgatgcagtttgagctgccaggtgcttttatcattcaaggggtaaaatagcagaaaagccttaatgtgtcaaggggattttagatttactatttccaatttacgattttggattgagattgcttcggcctaaaagacaggcctcgcaatgacccccttagagttgaaagcactctaaacaagggggcaggcggggggaatatcgaatatcgaatctgaatgtccaatgtcgaagtgcaactgcgcgggaatgacaggtcggcagatttatttaattctgtggccagatccctccgcttcgtccacctgcggtggacttcggtcgggatgacactgggggtgtgccattgctccgctcg

SEQ ID NO: 276 - DNA, 5375 bp, Artificial Sequence
  Synthetic Oligonucleotide
agccgagtcgatggtagctaaggtgaacgacaagcgtggttatacggagataagttgatgcgactggttatccatgaggacgaagtagattcgatggattggttatatggaattagatcgaaacgtatacctatgaagctcacagtcaaataccaatcgggatagaaatgcggcgcgcgcaaccttaggcaaaggcttggctgtttcagcgtttccgctttacgtgcccgtttagccttcaccatagtccacctttccgcaagcctccctgcgatcccggacagtcggatttcccaaatccggttctggtctcggccctatttgtcattttctggataaaggccttcctgtacaatttgagacttaagtgctagctcacttgcaccccataattgtacagtttaccagtatcctcgttccgagagtccatggcattcgttccagttcggtgcctggatgcacatgccttactcagaaccaccgagtacccagagcccctttgtcaggcgtgggcgctacccactacctggatgactttgaaagtcacctcagaagacattactcttccttcatagctcatacggactcatgcgccagaccaaatccctcccaacgtcttggttttcccttgtacgttaggtctttgcaggttgtcgccagtccctgctgggaaacggcccttcccgacattatctctgcaatccttgtataggtgcaaggacccttaccccgcagcgtcccttcggtgcccttgcccgtttcttcccgaaggactgcggtctcacctcaggatttaaaggttcgacacgccaattatccgtcgcaatgcaacttcaacaacggggcaaatttcggggctgcagtcattccataacgttcaagctcctatacctgctatgccctgcggttgcacccaccactgagcatatatgagctcagggcagccgggccgtttacaccacgcatcgcccggatggttacccattccgagatgtggcatcgctacgtgcctgaatcgggcaactggcacgacgggactttcacccgctggattgcagccttgtcggctgctccaaatccctgttgccacaaaaattttctttgaggcatccacgttacgacgtgtcggccacgcttcgtagcttatctgaacagcctttcgacttcacgatgcattataatggacatcgtgaatctagctatgtcatggtcaatcgtagtgtggccaggggccggccaatcgagtatacttgataaagtgttcatgaagctgtattctttaatctcccaagagtatgcttcgaacgtttaagaaatgacagatagtggtgaagtggtctgaaaacgggcccgggaggcgaagacgtgagtacaggtacagtgaaatggtttaatgcaagaaggggatacggttttattgtccccgatgatggcggagatgatttatttgttcaccgttcggacattaacacagaggactatgcatcgcgagattattaaggtcggcaacgacatggttgccgaccatatcaatcataagggcttggataatcgcaaggccaatttgcgagcggcgacgattgcgcagaatgcgtggaaccgccagcgcaaaagaagcggatttatgggcgtagtgtggaataagcagatgaggaaatggcgtgttaatatcagtcacgagggcacgtgcaggcatatcggctacttcgatgatgaggttgaagcggcgaaggcgcacgaccgggcagcgaaaaaatatcacggagagttcgcgagtttgaatttcacgcgttaaagccacatcacagcgagtccgactatggcggacgcagcaatcttaagcatatttggctgcgcaatgtgttgcgcgggttcctgcttggggcgagctatcgaggtgtaatcaccccacaaatcgggggcttctccagcgccgtaaaagttgataagaattttagatgcgccgtaatcacccctcaaatcgggggcttctccagcgctgaccgaattgataaaaccaagagagcgctgtaatcaccccacaaatcgggggcttctccagctgtacgacaaatcataacagaatatttgaagctgcaatcaccccacaaatcgggggcttctccagcaaaatgagacaccacgcttgacgtcactgtgctgtaatcaccccacaaatcgggggcttctccagcttcgagctatatctggctcggtctgatttggctgtaatcaccccacaaatcgggggcttctccagcactggcttagcaagttcctttgggcgtttcgctgtaatcaccccacaaatcgggggcttctccagctaatcgaagatgagaccgaagactatcactgctgtaatcaccccacaaatcgggggcttctccagctgattgggaaagcactccttacgcacgagagctgtaatcaccccacaaatcgggggcttctccagcacatcctcgataatacgttatctcgattggatttacaacagaaaaatcactgaaaataccagggtttttggtgcaatgcgcacacattagaacctgttttcatactgctaaagaccagcgtttttcaatcccttcccttttcataattccacagaacctcttaaaatctgccctggcaaaattaaggttatgatgcaaaagcgcgtttcgcacacgtcggagagctttctggtcatcttcattgtaggcgcttttatccattatctcgctaaatgggatgtagttctttggaggtcttggctgctctggaccgatagtctttttctcaagctcgagtatggcttcaattccttccctttgcaggtttgtgtatctgttcatcccttgcgtataaagcctatggtagtcgatttgttcttcgtcttttggcaaaaaataatcgcaaagtcgggccaaaaactccgcgtcgtccatcacatagagtttcgtataatccctcagcgagaaccgtaccgaacaactctgctccggctgtgccggattcttcaaggtgaaaataattacttcttcgccatcctctttcttccactcgatttgctgtgccctcttggcaagctctttgttaagactaagatgatattgccttgcgatcatcagcaaaagcctgtccattgccagtgtttcatacagtctcttattgtctttatcaaacgtatcaagtgacacgatttcgtaatactccccccccagaggaacatcataaacctctcctttttccctcaccgcttcttcaacaagcctcgcaaaactctttctgctttctctgaagaattcattcctcaaaaatcctttataaataaccggctgtttcacaaccctgtccgtcttttcttcaaatgacacctctttttcttctttgggtatcagtccaacatattccttcagttcttctctgcctaggctttcaagttcttgcacgaccaaatcgcacaccttttcgtgcagcgcattgacgcttttatgcctggaaagattgcacacgatgttcttatctatccgtctggtcttcttcaattcttcaagctctcggtaaaacccgtcgaggtgcttagtgaccaaaagctccaaaatacggttatattcatcgatgttcagcggcctctcacaccgctcattgatatacctcagaatatcccgtccttttcgatggagctgaagctccctcgacttttcttttttctccaaccacttggccttaacataatcaactcgcgccttgatctttttttcatcatcaacccctaagagacccagatgggaacgcacaaacctcggaagaaatctcacgtatccttcaatctcttccgtgcttttcttctctatgtgaggcaactggttgcgcaagctatgaacatacctgtcgattcttttgactgcctctgctccttttcctaataagctcagtagaacaagatatttaagctcgtagacgcccatcctgaatatataggtttgggcgcctttcttctgagttcgcagaatgacgttattgtgtttgatataaaatgggtctccttcggctctctcaaaatgaatctcgactctcggcttcttcctgtgaggtttctgctccttgccatctgtattttcgtcctgctcccgcttaatcctcgttctggcaaaacatgctgtgtagtctgccaaatcctccagcccgtaatcctcaagatagttcagcgcaaacaatatgaacttgtccgtctttctttcgcttaactgggtttcgcttcgcatttgcgattctttgatacgctgatacgactcactgggaactcgtgacaaataccccagaatatcccggaacatgaccgcatcatgatccggcgtcttaaccgaataactgtccctaagacaatatgtcgaaaaaacgtcccgcgttattttatattccccctctgtacgcgtaaacccctgaacatatcccattaaccgatttaggaaccttctctcagcaaaaaatgacgcgaaaaataccacacctgctgatgttatcctgccgttctcttcgaacaactccccaaattcaatcgaaatatcttcctgttccttttttgcctgttcaaaacgcgccttttcgtacgctttttccataattatcctgaccgggtcattttgggtgaatatcaggcagtcaggcgtatgaaaatagtgcgagaaataattcctcaaatctctaagcttttcatcagccgctttttgaatttcctcctctacttcgttttgttcttgttttgcatagatcagttttttcgtttcctggtcaaaccaatcttcctttctgatcctttcgaatcgtgtcagcgtttcctcgaacaacttcggattcccctgcaaatttgtttgcgccctattaagcactatcgcaaaacaccacttcttggccccctcatattgctcgatagaatacattccttggctgcttcctttcttgatattttcaacctgcatatctcagactctcccaattgttgtttttcgccatttttgttgaagtccccgaatgtcagtctattgggccagctgagtcaacccacaaggcacaatgtacatacagtctcgagtcatttcgagaagactttccgctcgcccgataagataagctttgagtatctcacggggtggacccgagcagataattccacatctcgtatccggtgaagctatccggcataaattcgtgcttagtgaatcgtgtttcgtgttgatacggctcccggctgcattcacttttcacggcagagaatatcgcaaaataaggcaacagtcaaaggaaaaagggtaaaaatggtgaaatagatgagcgagcagtgaattgttgtggcaagcaagccgcaaatgaatccttcggccacgctc

SEQ ID NO: 277 - DNA, 5615 bp, Artificial Sequence
  Synthetic Oligonucleotide
tatccaaaatgtggtttgaattcaagaatcaacgctttattccttaaaaaggggcggtgcgatggaaaaagaaccagaaacatccgtgcaatcggcgtcgggacacaatatggatatcccgattgactggtcggtaacctcacgctatttcgaagatgaagatacgctgatgcaggtggtggggatatttgctgaagactctccgcagaccgtccgggaccttgccaaggctatacagacgcaaatatcccaggatgttcaattgcacgctcacagcctgaagggagcctcggctcttatcggggccgaacatctgcggcaaagagcctggcggcttgaatacgccgcccaggagaaaaacacggcggcgtttgaggcgctgtttgacgagacaaaggccgagttcgacaagctgatgtcgttcctttaccgcgccgattggattgaagcagcaaaagaacgccactgcaacaggcaacaggccgagcaggtatgaaacatcttttggaaaagaaggcgatggaatgagtggatggttctccattttgatcattgatgatgacaggatggttacagacaagttggagaagatcagcggcgccaaggctgcaaagaaaaggttcagcctggcaggcgttttctcaaagggcgcctgaagccctttatttgcaggcgtgctaccgcttgtcaacgggcaggggacagaaccgcaatcaggattaccatcagtttcttcattccattaacctcgctttttcctctcgttctttttcttcttcctggttttcgcagcgttgggctgtctttttgccggttttgtatagttgtcgccgtaaatgtcaatgagtgcggcttttagtttttcgggccagttgcggttttcaaaagcgcacacgagcggatcgccgctttgtttcatccagttatgaagccggccctgcatcttcttgatttcgctcctttgctctgcggaatcgataaggttgttgaggcagtcggggtcatttctgagatcatagaactcctcggccgcgcgatatctgaacatcttgacgcgctgtgcggcgaacttattcgttggagcggcctcgaccatcgccttcatggtaaggccctcgttgttgtttcggtaccagaatctgccgtcggcccacggattgaagatatagccgaagcgcttatcctggacgcaccgcatcgggacagcgtctccgccggctttcatgtctatctgcgtaaagaccacgtcgcgtccggattgcttttcgcctttcaacagccccaggaaagaggaaccgtcaagccccctgggtatgcccagaccgaccgcttcgagcaccgtcgggaagaagtcgatccctgagataaagtgcgccttatcgacggcgcctgcttttaccatttgcggccaacgaacgatccacggcgtccgcgtgctggcaagataggcgttgcattttgcaaacggtatggcgatgccgttgtcggagaggaacatcacaagcgtattctcctcgaagcccgactccttcagggcctgcaacgtcttgccgaaggtatcgtcgagtcggcggacggagttgagatagcagctcagttcctgccgaacgcccggcaggtcgcagacaaaaccgggaaccgcaacctcatcgggcttatacgtctttgaaggttcctttgcccccttgattggcttgccgccgatatgatacgggcgatgcggatcgtgcgagttgaccataaagtagaagggcttattctcgcggcgacacctcgccagaaactccttgcagtaaactgtaatagagttccggatcgcggccggcgccgagttccttctggtcatgcacaaaatcccatttgtaatccgcatggggcgttgagtgccccaccttgccgagaataccggtaagatagccggcatccctcagcgtctgcatgacagtcatcaccaaggcggcgcccaatcctgcggcccttagaaaatcacgacgattcatcattgtccccactaatccttattgttcttctcaagataccccgacaatttctgcatttgccgatacaggccgccgggacatatcagtatagccgcaaaccttgaaaatatcaacctcccggaatataacgtcgacttccaacccagatcgccaatccagaataagaaaacaaagcaaaacgcttcaaattcgtttaaccccagggttcgcctgaggttcgtaaacaccatctcgatgtacatcgggattcaaattcgttgagccccagcccttcttgtggctcttgttcggcaagaaacgctgtaatcaccccacaaatcgggggctgctccagcatcgccaagacgggcaatgccgctttgaggctgtaatcaccccacaaatcgggggctgctccagctgatttcgagtttcgatgctttcggacagggctgtaatcaccccacaaatcgggggctgctccagcactccttatggagaaggagcttatcgtgtcgctgtaatcaccccacaaatcgggggctgctccagcttattccttccatcatcccgacagcagtgggctgtaatcaccccacaaatcgggggctgctccagcccactttcgtaaccattttactcgcaaacgcttataacgaaaacactttccaaaaaccataccaacgtcctcatttaacaggaaacttccactccttttcaattccatatttcttcataacatcactaaacaacccaaattcatctatcacaaactttaaatgatgatggaaaaacgctctacgcaccttattcacggcggtcttctccgcctctttacacattgtttgtgccagtatctcacgaaaatcaatataatgcgccccttccttctcgctcatctttttggctttgacaaccttctcttcaaacgccagcaccgcctcgacacatttcttctgcagatcattatatgccctaaaccctttttcgtaaactgtatgataccgtatcttccctttttcgtgcggcataaagtactcacatatccgcccaagaaactcagcgtcatccaacacatataacttgccgtaatcactcactgagaagacgatgcttttttcgttacccactgagccctccacgggcaactcgatgctatcattcgaccacacaattttattacccaattccttgcgtacactccccaggaagtattgcgccatcatcagacacaaacggtctcgcgccagcgtttcatacaaggctggattagcaccctcgaatcgcccaatcgcatcaatatgataatactttttatccagcccaacgtccctctgtccgccgccgctttccaaatgctcttccacaagcttcgcgaatcccttcttgctgtcataccagaacttcttgcgcaagaaacccctgcggatagaaatatgctccttgaaccatgcaaccttctgcttgtaatctatttcatccttcttcccaagccccacataatcgtagagcttctgatcgccgattcggcaaagtctgttgagaatctgatcacacaccacctgatgcatctcgtttattgtggaggtctgcgcaaaaattgaatatacccgcccgtcgattcgctcggccagttgcaggcgtttcagtcccgcctgaaaattctcaacatccttgccaaccagacacaccagcagccggttgtactcgccgggattgaaagacctcgtgcaattttcatttacgtattgaagaatgtcccgcgccttctcgtgaagtgtcatctcgttggtcgccgccttcttcttttcccacacccctcgaacatgctttactctgccgtctattctttgcttaaaagctttcctgccaatcccatgttgctccagcacaaatcgcggcaggaagacgtgattatccttatctgtgaccttcactacatccagaatgttctccacatgctgccgatacctgtacagttttgcaatcgcatcgtcgccctttccctgaaggctaagcaatacaaggtatttcaattcgttaagccccatgcgataactccgaggcccggcattcttatcaatcctgacgataacattgttcttactgatatagtatgactgatcttcgtctttttttgaaaagtcgacaactaccttgcctttggtcctgtgctttttgtgttcgtcgcctgccccggcctcctccctgacaatgtgtcgccgcccgaagcatatctcactgtgttgcgcctccagataatgcagtgcaaactcgatgaacttgtctttatggcgtttcggattcgtcccctcattgtcgtttgctcttttcttgtcgccctgctctccgtggtagtattcatacgcctccgcagggatgcgtccaagctgcgcgagtatatccctgaaaagcagcacgcgtttgtcccacgccttcgtgaaacgactgtctttcaggcaatacatcgaaagcgccttccgagtcagcttgtactgtccttcgtttttcttaagcccacttaccgcaccgtacaaacgatccagcacccgccgttcaacaaagaacgaaacgaaaaacacaacccccgccgtagtgatccggtcgccttcgaacaggctgggaaactcgatgatcacttcagtttcgcgtctcctgcattcaaagatcgcccgctcatacgccctttccatgattgtccgcaactcatcttctgctgtaaatgtcagacacccgggcgaatgtcgatagtgggagaaatagtttcttaacgcctcggccttcgcattggccgcttgtgtgctacacttgatcaaagcgcgtgtatcctcatcgtaccagtcgtgctttgaatacttttcatggcgtaacagcgactcgacaaaaagcccgtcgttcttatctcgattcacaagagccttgttgaaggcaatcgtaaaacaccatttccgagcaccttgatattcatcgatagacaactctctctttttcgaagtctgctttgacacttgcgccattgagcacctcccattccagattttagtgcgatctttacctcatgcctccacaacactcccagcgccaaacgttgagcaaagcaaaatacgccgcaggcgggctccgtcgaatccgtaatcctaatttctaacttcccaatcatctaaaccgcccgcaaccgatttgtcaaccaaaaaccacatcaatccgcagatggccgcagataaccgcagatattgcaactaatccacccaacccaaaacctctgttccatctgcgccctctgcgaaatctgcggacagctttttttttcgtgcccttcatgtcttcgtggtgaatttcatttaacatttgacaaatatcaaacggcatggtataatgcgttgcgtatttaaggacaaagcaacaccaaaaacagggggagtaaaaaaccgtgtccatccaaaaagaatcgcaggccgcaggcctgccacctatgattaacctcggtctttcagccaaggatgctccccacacccaaacaagcgaaacgaaccgtgcgccaagctaagctggtgcaattcagcaggtgtaatcctgcccggtcaaaggttagccgcccggccggaatgaacatgtacgtataaggaggcaacaaat

SEQ ID NO: 278 - DNA, 36 bp, Artificial Sequence
  Synthetic Oligonucleotide
gctgtaatcaccccacaaatcggaggcttcttcagc

SEQ ID NO: 279 - DNA, 36 bp, Artificial Sequence
  Synthetic Oligonucleotide
gctgtaatcactccacaaatcggaggcttcttcagc

SEQ ID NO: 280 - DNA, 36 bp, Artificial Sequence
  Synthetic Oligonucleotide
gctgaagaagcctccgatttgtggggtgattacagc

SEQ ID NO: 281 - DNA, 36 bp, Artificial Sequence
  Synthetic Oligonucleotide
gctgaagaagcctccgatttgtggagtgattacagc

SEQ ID NO: 282 - DNA, 36 bp, Artificial Sequence; identical to SEQ ID NO: 278
  Synthetic Oligonucleotide

SEQ ID NO: 283 - DNA, 36 bp, Artificial Sequence; identical to SEQ ID NO: 279
  Synthetic Oligonucleotide

SEQ ID NO: 284 - DNA, 36 bp, Artificial Sequence; identical to SEQ ID NO: 280
  Synthetic Oligonucleotide

SEQ ID NO: 285 - DNA, 36 bp, Artificial Sequence; identical to SEQ ID NO: 281
  Synthetic Oligonucleotide

SEQ ID NO: 286 - DNA, 36 bp, Artificial Sequence
  Synthetic Oligonucleotide
gctgtaatcaccccacaaatcgggggcttctccagc

SEQ ID NO: 287 - DNA, 36 bp, Artificial Sequence
  Synthetic Oligonucleotide
gctgcaatcaccccacaaatcgggggcttctccagc

SEQ ID NO: 288 - DNA, 36 bp, Artificial Sequence
  Synthetic Oligonucleotide
gccgtaatcacccctcaaatcgggggcttctccagc

SEQ ID NO: 289 - DNA, 36 bp, Artificial Sequence
  Synthetic Oligonucleotide
ggtgtaatcaccccacaaatcgggggcttctccagc

SEQ ID NO: 290 - DNA, 36 bp, Artificial Sequence
  Synthetic Oligonucleotide
gctggagaagcccccgatttgtggggtgattacagc

SEQ ID NO: 291 - DNA, 36 bp, Artificial Sequence
  Synthetic Oligonucleotide
gctggagaagcccccgatttgtggggtgattgcagc

SEQ ID NO: 292 - DNA, 36 bp, Artificial Sequence
  Synthetic Oligonucleotide
gctggagaagcccccgatttgaggggtgattacggc

SEQ ID NO: 293 - DNA, 36 bp, Artificial Sequence
  Synthetic Oligonucleotide
gctggagaagcccccgatttgtggggtgattacacc

SEQ ID NO: 294 - DNA, 36 bp, Artificial Sequence; identical to SEQ ID NO: 286
  Synthetic Oligonucleotide

SEQ ID NO: 295 - DNA, 36 bp, Artificial Sequence; identical to SEQ ID NO: 287
  Synthetic Oligonucleotide

SEQ ID NO: 296 - DNA, 36 bp, Artificial Sequence; identical to SEQ ID NO: 288
  Synthetic Oligonucleotide

SEQ ID NO: 297 - DNA, 36 bp, Artificial Sequence; identical to SEQ ID NO: 289
  Synthetic Oligonucleotide

SEQ ID NO: 298 - DNA, 36 bp, Artificial Sequence; identical to SEQ ID NO: 290
  Synthetic Oligonucleotide

SEQ ID NO: 299 - DNA, 36 bp, Artificial Sequence; identical to SEQ ID NO: 291
  Synthetic Oligonucleotide

SEQ ID NO: 300 - DNA, 36 bp, Artificial Sequence; identical to SEQ ID NO: 292
  Synthetic Oligonucleotide

SEQ ID NO: 301 - DNA, 36 bp, Artificial Sequence; identical to SEQ ID NO: 293
  Synthetic Oligonucleotide

SEQ ID NO: 302 - DNA, 36 bp, Artificial Sequence
  Synthetic Oligonucleotide
gctgtaatcaccccacaaatcgggggctgctccagc

SEQ ID NO: 303 - DNA, 36 bp, Artificial Sequence
  Synthetic Oligonucleotide
gctggagcagcccccgatttgtggggtgattacagc

SEQ ID NO: 304 - DNA, 36 bp, Artificial Sequence; identical to SEQ ID NO: 302
  Synthetic Oligonucleotide

SEQ ID NO: 305 - DNA, 36 bp, Artificial Sequence; identical to SEQ ID NO: 303
  Synthetic Oligonucleotide

SEQ ID NO: 306 - DNA, 30 bp, Artificial Sequence
  Synthetic Oligonucleotide
gggcattggcttccatctctttgagcacct

SEQ ID NO: 307 - DNA, 30 bp, Artificial Sequence
  Synthetic Oligonucleotide
ggaatgtcgacgatcgcctcgcctatgccg

SEQ ID NO: 308 - DNA, 30 bp, Artificial Sequence
  Synthetic Oligonucleotide
gtaatgcctggcttgtcgacgcatagtctg

SEQ ID NO: 309 - protein, 15 aa, Artificial Sequence
  Synthetic Peptide
GSSLQKKLEELELGS

SEQ ID NO: 310 - RNA, 30 nt, Artificial Sequence
  Synthetic Oligonucleotide
gugccauugaugugggacaggcagaucaga

SEQ ID NO: 311 - RNA, 31 nt, Artificial Sequence
  Synthetic Oligonucleotide
guugggcgugcucuugaugugggacaggcag

SEQ ID NO: 312 - RNA, 31 nt, Artificial Sequence
  Synthetic Oligonucleotide
ggccuuugaugugggacaggcagaucagaca

SEQ ID NO: 313 - RNA, 30 nt, Artificial Sequence
  Synthetic Oligonucleotide
gugccguugaugugggacaggcagaucaga

SEQ ID NO: 314 - RNA, 31 nt, Artificial Sequence
  Synthetic Oligonucleotide
gggaacggcagaucagacagccccuggugca

SEQ ID NO: 315 - RNA, 31 nt, Artificial Sequence
  Synthetic Oligonucleotide
gggauuggcagaucagacagccccuggugca

SEQ ID NO: 316 - RNA, 30 nt, Artificial Sequence
  Synthetic Oligonucleotide
gugauauugaugugggacaggcagaucaga

SEQ ID NO: 317 - RNA, 30 nt, Artificial Sequence
  Synthetic Oligonucleotide
gugcuauugaugugggacaggcagaucaga

SEQ ID NO: 318 - RNA, 30 nt, Artificial Sequence
  Synthetic Oligonucleotide
gugguauugaugugggacaggcagaucaga

SEQ ID NO: 319 - RNA, 30 nt, Artificial Sequence
  Synthetic Oligonucleotide
guguuauugaugugggacaggcagaucaga

SEQ ID NO: 320 - RNA, 30 nt, Artificial Sequence
  Synthetic Oligonucleotide
gugauuuugaugugggacaggcagaucaga

SEQ ID NO: 321 - RNA, 30 nt, Artificial Sequence
  Synthetic Oligonucleotide
gugcuuuugaugugggacaggcagaucaga

SEQ ID NO: 322 - RNA, 30 nt, Artificial Sequence
  Synthetic Oligonucleotide
gugguuuugaugugggacaggcagaucaga

SEQ ID NO: 323 - RNA, 30 nt, Artificial Sequence
  Synthetic Oligonucleotide
guguuuuugaugugggacaggcagaucaga

SEQ ID NO: 324 - RNA, 30 nt, Artificial Sequence
  Synthetic Oligonucleotide
gugaucuugaugugggacaggcagaucaga

SEQ ID NO: 325 - RNA, 30 nt, Artificial Sequence
  Synthetic Oligonucleotide
gugcucuugaugugggacaggcagaucaga

SEQ ID NO: 326 - RNA, 30 nt, Artificial Sequence
  Synthetic Oligonucleotide
guggucuugaugugggacaggcagaucaga

SEQ ID NO: 327 - RNA, 30 nt, Artificial Sequence
  Synthetic Oligonucleotide
guguucuugaugugggacaggcagaucaga

SEQ ID NO: 328 - RNA, 30 nt, Artificial Sequence
  Synthetic Oligonucleotide
gugauguugaugugggacaggcagaucaga

SEQ ID NO: 329 - RNA, 30 nt, Artificial Sequence
  Synthetic Oligonucleotide
gugcuguugaugugggacaggcagaucaga

SEQ ID NO: 330 - RNA, 30 nt, Artificial Sequence
  Synthetic Oligonucleotide
gugguguugaugugggacaggcagaucaga

SEQ ID NO: 331 - RNA, 30 nt, Artificial Sequence
  Synthetic Oligonucleotide
guguuguugaugugggacaggcagaucaga

SEQ ID NO: 332 - RNA, 30 nt, Artificial Sequence
  Synthetic Oligonucleotide
gugacauugaugugggacaggcagaucaga

SEQ ID NO: 333 - RNA, 30 nt, Artificial Sequence
  Synthetic Oligonucleotide
guggcauugaugugggacaggcagaucaga

SEQ ID NO: 334 - RNA, 30 nt, Artificial Sequence
  Synthetic Oligonucleotide
gugucauugaugugggacaggcagaucaga

SEQ ID NO: 335 - RNA, 30 nt, Artificial Sequence
  Synthetic Oligonucleotide
gugacuuugaugugggacaggcagaucaga

SEQ ID NO: 336 - RNA, 30 nt, Artificial Sequence
  Synthetic Oligonucleotide
gugccuuugaugugggacaggcagaucaga

SEQ ID NO: 337 - RNA, 30 nt, Artificial Sequence
  Synthetic Oligonucleotide
guggcuuugaugugggacaggcagaucaga

SEQ ID NO: 338 - RNA, 30 nt, Artificial Sequence
  Synthetic Oligonucleotide
gugucuuugaugugggacaggcagaucaga

SEQ ID NO: 339 - RNA, 30 nt, Artificial Sequence
  Synthetic Oligonucleotide
gugaccuugaugugggacaggcagaucaga

SEQ ID NO: 340 - RNA, 30 nt, Artificial Sequence
  Synthetic Oligonucleotide
gugcccuugaugugggacaggcagaucaga

SEQ ID NO: 341 - RNA, 30 nt, Artificial Sequence
  Synthetic Oligonucleotide
guggccuugaugugggacaggcagaucaga

SEQ ID NO: 342 - RNA, 30 nt, Artificial Sequence
  Synthetic Oligonucleotide
guguccuugaugugggacaggcagaucaga

SEQ ID NO: 343 - RNA, 30 nt, Artificial Sequence
  Synthetic Oligonucleotide
gugacguugaugugggacaggcagaucaga

SEQ ID NO: 344 - RNA, 30 nt, Artificial Sequence
  Synthetic Oligonucleotide
guggcguugaugugggacaggcagaucaga

SEQ ID NO: 345 - RNA, 30 nt, Artificial Sequence
  Synthetic Oligonucleotide
gugucguugaugugggacaggcagaucaga

SEQ ID NO: 346 - RNA, 30 nt, Artificial Sequence
  Synthetic Oligonucleotide
guaaugccuggcuugucgacgcauagucug

SEQ ID NO: 347 - RNA, 31 nt, Artificial Sequence
  Synthetic Oligonucleotide
ggugcuagugaugugggacaggcagaucaga

SEQ ID NO: 348 - RNA, 31 nt, Artificial Sequence
  Synthetic Oligonucleotide
ggugcuauggaugugggacaggcagaucaga

SEQ ID NO: 349 - RNA, 31 nt, Artificial Sequence
  Synthetic Oligonucleotide
ggugcuauugaugggggacaggcagaucaga

SEQ ID NO: 350 - RNA, 31 nt, Artificial Sequence
  Synthetic Oligonucleotide
ggugcuagggaugugggacaggcagaucaga

SEQ ID NO: 351 - RNA, 31 nt, Artificial Sequence
  Synthetic Oligonucleotide
ggugcuagggaugggggacaggcagaucaga

SEQ ID NO: 352 - RNA, 51 nt, Artificial Sequence
  Synthetic Oligonucleotide
gcgcccugugcggacuccuugucgccuucguagguguggcagcguccuggg

SEQ ID NO: 353 - RNA, 31 nt, Artificial Sequence
  Synthetic Oligonucleotide
guauugaugugggacaggcagaucagacagc

SEQ ID NO: 354 - RNA, 31 nt, Artificial Sequence
  Synthetic Oligonucleotide
ggcuauugaugugggacaggcagaucagaca

SEQ ID NO: 355 - RNA, 31 nt, Artificial Sequence
  Synthetic Oligonucleotide
ggugcuauugaugugggacaggcagaucaga

SEQ ID NO: 356 - RNA, 31 nt, Artificial Sequence
  Synthetic Oligonucleotide
ggcgugcuauugaugugggacaggcagauca

SEQ ID NO: 357 - RNA, 31 nt, Artificial Sequence
  Synthetic Oligonucleotide
ggggcgugcuauugaugugggacaggcagau

SEQ ID NO: 358 - RNA, 31 nt, Artificial Sequence
  Synthetic Oligonucleotide
guugggcgugcuauugaugugggacaggcag

SEQ ID NO: 359 - RNA, 31 nt, Artificial Sequence
  Synthetic Oligonucleotide
gucuugggcgugcuauugaugugggacaggc

SEQ ID NO: 360 - RNA, 31 nt, Artificial Sequence
  Synthetic Oligonucleotide
gcaucuugggcgugcuauugaugugggacag

SEQ ID NO: 361 - RNA, 31 nt, Artificial Sequence
  Synthetic Oligonucleotide
guucaucuugggcgugcuauugaugugggac

SEQ ID NO: 362 - RNA, 31 nt, Artificial Sequence
  Synthetic Oligonucleotide
gucuucaucuugggcgugcuauugauguggg

SEQ ID NO: 363 - RNA, 31 nt, Artificial Sequence
  Synthetic Oligonucleotide
gcuucuucaucuugggcgugcuauugaugug

SEQ ID NO: 364 - RNA, 31 nt, Artificial Sequence
  Synthetic Oligonucleotide
gaacuucuucaucuugggcgugcuauugaug

SEQ ID NO: 365 - RNA, 31 nt, Artificial Sequence
  Synthetic Oligonucleotide
gugaacuucuucaucuugggcgugcuauuga

SEQ ID NO: 366 - RNA, 31 nt, Artificial Sequence
  Synthetic Oligonucleotide
ggaugaacuucuucaucuugggcgugcuauu

SEQ ID NO: 367 - RNA, 31 nt, Artificial Sequence
  Synthetic Oligonucleotide
ggggaugaacuucuucaucuugggcgugcua

SEQ ID NO: 368 - RNA, 51 nt, Artificial Sequence
  Synthetic Oligonucleotide
guauugaugugggacaggcagaucagacagccccuggugcagccagcuuuc

SEQ ID NO: 369 - RNA, 51 nt, Artificial Sequence
  Synthetic Oligonucleotide
ggcuauugaugugggacaggcagaucagacagccccuggugcagccagcuu

SEQ ID NO: 370 - RNA, 51 nt, Artificial Sequence
  Synthetic Oligonucleotide
ggugcuauugaugugggacaggcagaucagacagccccuggugcagccagc

SEQ ID NO: 371 - RNA, 51 nt, Artificial Sequence
  Synthetic Oligonucleotide
ggcgugcuauugaugugggacaggcagaucagacagccccuggugcagcca

SEQ ID NO: 372 - RNA, 51 nt, Artificial Sequence
  Synthetic Oligonucleotide
ggggcgugcuauugaugugggacaggcagaucagacagccccuggugcagc

SEQ ID NO: 373 - RNA, 51 nt, Artificial Sequence
  Synthetic Oligonucleotide
guugggcgugcuauugaugugggacaggcagaucagacagccccuggugca

SEQ ID NO: 374 - RNA, 51 nt, Artificial Sequence
  Synthetic Oligonucleotide
gucuugggcgugcuauugaugugggacaggcagaucagacagccccuggug

SEQ ID NO: 375 - RNA, 31 nt, Artificial Sequence
  Synthetic Oligonucleotide
gggauuccacaguccagguaagacuguugcu

SEQ ID NO: 376 - RNA, 31 nt, Artificial Sequence
  Synthetic Oligonucleotide
gaccagaauugauuccagaguccagguaaga

SEQ ID NO: 377 - RNA, 31 nt, Artificial Sequence
  Synthetic Oligonucleotide
guggcaccauaauggauuccagaguccaggu

SEQ ID NO: 378 - RNA, 31 nt, Artificial Sequence
  Synthetic Oligonucleotide
gaggagcuguguuaguggcaccagaauggau

SEQ ID NO: 379 - RNA, 31 nt, Artificial Sequence
  Synthetic Oligonucleotide
gucagagaacgagcugugguaguggcaccag

SEQ ID NO: 380 - RNA, 31 nt, Artificial Sequence
  Synthetic Oligonucleotide
gcucagagaaguagcugugguaguggcacca

SEQ ID NO: 381 - RNA, 31 nt, Artificial Sequence
  Synthetic Oligonucleotide
gaccacucagacaaggagcugugguaguggc

SEQ ID NO: 382 - RNA, 31 nt, Artificial Sequence
  Synthetic Oligonucleotide
gugugucuagaauauccaagagacagguuuc

SEQ ID NO: 383 - RNA, 31 nt, Artificial Sequence
  Synthetic Oligonucleotide
ggaucauauuccuccacaaaaugauucugaa

SEQ ID NO: 384 - RNA, 31 nt, Artificial Sequence
  Synthetic Oligonucleotide
gucuugccuacuccaccagcuccaacuacca

SEQ ID NO: 385 - RNA, 31 nt, Artificial Sequence
  Synthetic Oligonucleotide
gguaucgucaacgcacucuugccuacgccac

SEQ ID NO: 386 - RNA, 31 nt, Artificial Sequence
  Synthetic Oligonucleotide
gcggaccccgcuaugagggcggcggcaagga

SEQ ID NO: 387 - RNA, 31 nt, Artificial Sequence
  Synthetic Oligonucleotide
gauauuccuccacaaaaugauucugaauuag

SEQ ID NO: 388 - RNA, 31 nt, Artificial Sequence
  Synthetic Oligonucleotide
ggacggaccccucgaugagggcggcggcaag

SEQ ID NO: 389 - RNA, 31 nt, Artificial Sequence
  Synthetic Oligonucleotide
gggaagaagaccgaccccgcgaugagggcgg

SEQ ID NO: 390 - RNA, 31 nt, Artificial Sequence
  Synthetic Oligonucleotide
gggucguccuacaugcccuucucaugcaugg

SEQ ID NO: 391 - RNA, 31 nt, Artificial Sequence
  Synthetic Oligonucleotide
gagcgcgggucuuccgacaugcccuucucau

SEQ ID NO: 392 - RNA, 31 nt, Artificial Sequence
  Synthetic Oligonucleotide
gugguuguagcccgggucguccgacaugccc

SEQ ID NO: 393 - RNA, 31 nt, Artificial Sequence
  Synthetic Oligonucleotide
gguuguagcgcuggucguccgacaugcccuu

SEQ ID NO: 394 - RNA, 31 nt, Artificial Sequence
  Synthetic Oligonucleotide
gggauuagcugcauugucagugcgcuuuucc

SEQ ID NO: 395 - RNA, 31 nt, Artificial Sequence
  Synthetic Oligonucleotide
ggccaucuguguuugaaauacuucuggauua

SEQ ID NO: 396 - RNA, 31 nt, Artificial Sequence
  Synthetic Oligonucleotide
gcagcucgucuuaaccucuugagcugucuca

SEQ ID NO: 397 - RNA, 31 nt, Artificial Sequence
  Synthetic Oligonucleotide
ggugaacuucuuggguugcuuccucuugaga

SEQ ID NO: 398 - RNA, 31 nt, Artificial Sequence
  Synthetic Oligonucleotide
guuguaguagagaugcagcuggagccaucaa

SEQ ID NO: 399 - RNA, 51 nt, Artificial Sequence
  Synthetic Oligonucleotide
gaaacuuggucuucaggcauggggcagcgcuaccugggucagcuucaggau

SEQ ID NO: 400 - RNA, 31 nt, Artificial Sequence
  Synthetic Oligonucleotide
gugcgggggcacaucggcaggucaaugguau

SEQ ID NO: 401 - RNA, 51 nt, Artificial Sequence
  Synthetic Oligonucleotide
gcaacucagucuugauacauccaguuccuuuagggccaucaaguuccauug

SEQ ID NO: 402 - RNA, 31 nt, Artificial Sequence
  Synthetic Oligonucleotide
gccucaggacacauggggagcagguugucug

SEQ ID NO: 403 - RNA, 31 nt, Artificial Sequence
  Synthetic Oligonucleotide
gauuccauaguccagguaagacuguugcugc

SEQ ID NO: 404 - RNA, 31 nt, Artificial Sequence
  Synthetic Oligonucleotide
gggauuccauaguccagguaagacuguugcu

SEQ ID NO: 405 - RNA, 31 nt, Artificial Sequence
  Synthetic Oligonucleotide
gauggauuccauaguccagguaagacuguug

SEQ ID NO: 406 - RNA, 31 nt, Artificial Sequence
  Synthetic Oligonucleotide
ggaauggauuccauaguccagguaagacugu

SEQ ID NO: 407 - RNA, 31 nt, Artificial Sequence
  Synthetic Oligonucleotide
gcagaauugauuccagaguccagguaagacu

SEQ ID NO: 408 - RNA, 31 nt, Artificial Sequence; identical to SEQ ID NO: 376
  Synthetic Oligonucleotide

SEQ ID NO: 409 - RNA, 31 nt, Artificial Sequence
  Synthetic Oligonucleotide
ggcaccagaauugauuccagaguccagguaa

SEQ ID NO: 410 - RNA, 31 nt, Artificial Sequence
  Synthetic Oligonucleotide
guggcaccagaauugauuccagaguccaggu

SEQ ID NO: 411 - RNA, 31 nt, Artificial Sequence
  Synthetic Oligonucleotide
ggcaccauaauggauuccagaguccagguaa

SEQ ID NO: 412 - RNA, 31 nt, Artificial Sequence; identical to SEQ ID NO: 377
  Synthetic Oligonucleotide

SEQ ID NO: 413 - RNA, 31 nt, Artificial Sequence
  Synthetic Oligonucleotide
gaguggcaccauaauggauuccagaguccag

SEQ ID NO: 414 - RNA, 31 nt, Artificial Sequence
  Synthetic Oligonucleotide
gguaguggcaccauaauggauuccagagucc

SEQ ID NO: 415 - RNA, 31 nt, Artificial Sequence
  Synthetic Oligonucleotide
ggcuguguuaguggcaccagaauggauucca

SEQ ID NO: 416 - RNA, 31 nt, Artificial Sequence
  Synthetic Oligonucleotide
ggagcuguguuaguggcaccagaauggauuc

SEQ ID NO: 417 - RNA, 31 nt, Artificial Sequence; identical to SEQ ID NO: 378
  Synthetic Oligonucleotide

SEQ ID NO: 418 - RNA, 31 nt, Artificial Sequence
  Synthetic Oligonucleotide
ggaaggagcuguguuaguggcaccagaaugg

SEQ ID NO: 419 - RNA, 31 nt, Artificial Sequence
  Synthetic Oligonucleotide
gagagaaugagcugugguaguggcaccagaa

SEQ ID NO: 420 - RNA, 31 nt, Artificial Sequence
  Synthetic Oligonucleotide
gucagagaaugagcugugguaguggcaccag

SEQ ID NO: 421 - RNA, 31 nt, Artificial Sequence
  Synthetic Oligonucleotide
gacucagagaaugagcugugguaguggcacc

SEQ ID NO: 422 - RNA, 31 nt, Artificial Sequence
  Synthetic Oligonucleotide
gccacucagagaaugagcugugguaguggca

SEQ ID NO: 423 - RNA, 31 nt, Artificial Sequence
  Synthetic Oligonucleotide
ggagaaguagcugugguaguggcaccagaau

SEQ ID NO: 424 - RNA, 31 nt, Artificial Sequence
  Synthetic Oligonucleotide
gcagagaaguagcugugguaguggcaccaga

SEQ ID NO: 425 - RNA, 31 nt, Artificial Sequence; identical to SEQ ID NO: 380
  Synthetic Oligonucleotide

SEQ ID NO: 426 - RNA, 31 nt, Artificial Sequence
  Synthetic Oligonucleotide
gcacucagagaaguagcugugguaguggcac

SEQ ID NO: 427 - RNA, 31 nt, Artificial Sequence
  Synthetic Oligonucleotide
gcucagauaaggagcugugguaguggcacca

SEQ ID NO: 428 - RNA, 31 nt, Artificial Sequence
  Synthetic Oligonucleotide
gcacucagauaaggagcugugguaguggcac

SEQ ID NO: 429 - RNA, 31 nt, Artificial Sequence
  Synthetic Oligonucleotide
gaccacucagauaaggagcugugguaguggc

SEQ ID NO: 430 - RNA, 31 nt, Artificial Sequence
  Synthetic Oligonucleotide
guuaccacucagauaaggagcugugguagug

SEQ ID NO: 431 - RNA, 31 nt, Artificial Sequence; identical to SEQ ID NO: 382
  Synthetic Oligonucleotide

SEQ ID NO: 432 - RNA, 31 nt, Artificial Sequence
  Synthetic Oligonucleotide
ggcugugucuagaauauccaagagacagguu

SEQ ID NO: 433 - RNA, 31 nt, Artificial Sequence
  Synthetic Oligonucleotide
gcugcugugucuagaauauccaagagacagg

SEQ ID NO: 434 - RNA, 31 nt, Artificial Sequence
  Synthetic Oligonucleotide
gaccugcugugucuagaauauccaagagaca

SEQ ID NO: 435 - RNA, 31 nt, Artificial Sequence
  Synthetic Oligonucleotide
gauauucuuccacaaaaugauucugaauuag

SEQ ID NO: 436 - RNA, 31 nt, Artificial Sequence
  Synthetic Oligonucleotide
gucauauucuuccacaaaaugauucugaauu

SEQ ID NO: 437 - RNA, 31 nt, Artificial Sequence
  Synthetic Oligonucleotide
ggaucauauucuuccacaaaaugauucugaa

SEQ ID NO: 438 - RNA, 31 nt, Artificial Sequence
  Synthetic Oligonucleotide
guggaucauauucuuccacaaaaugauucug

SEQ ID NO: 439 - RNA, 31 nt, Artificial Sequence
  Synthetic Oligonucleotide
ggccuacuccaccagcuccaacuaccacaag

SEQ ID NO: 440 - RNA, 31 nt, Artificial Sequence
  Synthetic Oligonucleotide
guugccuacuccaccagcuccaacuaccaca

SEQ ID NO: 441 - RNA, 31 nt, Artificial Sequence; identical to SEQ ID NO: 384
  Synthetic Oligonucleotide

SEQ ID NO: 442 - RNA, 31 nt, Artificial Sequence
  Synthetic Oligonucleotide
gacucuugccuacuccaccagcuccaacuac

SEQ ID NO: 443 - RNA, 31 nt, Artificial Sequence
  Synthetic Oligonucleotide
gcgucaaugcacucuugccuacgccaccagc

SEQ ID NO: 444 - RNA, 31 nt, Artificial Sequence
  Synthetic Oligonucleotide
gaucgucaaugcacucuugccuacgccacca

SEQ ID NO: 445 - RNA, 31 nt, Artificial Sequence
  Synthetic Oligonucleotide
gguaucgucaaugcacucuugccuacgccac

SEQ ID NO: 446 - RNA, 31 nt, Artificial Sequence
  Synthetic Oligonucleotide
gcuguaucgucaaugcacucuugccuacgcc

SEQ ID NO: 447 - RNA, 31 nt, Artificial Sequence
  Synthetic Oligonucleotide
gccccgcuaugagggcggcggcaaggagcac

SEQ ID NO: 448 - RNA, 31 nt, Artificial Sequence
  Synthetic Oligonucleotide
ggaccccgcuaugagggcggcggcaaggagc

SEQ ID NO: 449 - RNA, 31 nt, Artificial Sequence; identical to SEQ ID NO: 386
  Synthetic Oligonucleotide

SEQ ID NO: 450 - RNA, 31 nt, Artificial Sequence
  Synthetic Oligonucleotide
ggacggaccccgcuaugagggcggcggcaag

SEQ ID NO: 451 - RNA, 31 nt, Artificial Sequence
  Synthetic Oligonucleotide
guguugcuuucggagaggcgcagcauccaca

SEQ ID NO: 452 - RNA, 31 nt, Artificial Sequence
  Synthetic Oligonucleotide
gcauguugcuuucggagaggcgcagcaucca

SEQ ID NO: 453 - RNA, 31 nt, Artificial Sequence
  Synthetic Oligonucleotide
guucauguugcuuucggagaggcgcagcauc

SEQ ID NO: 454 - RNA, 31 nt, Artificial Sequence
  Synthetic Oligonucleotide
gccuucauguugcuuucggagaggcgcagca

SEQ ID NO: 455 - RNA, 31 nt, Artificial Sequence
  Synthetic Oligonucleotide
ggaccccucgaugagggcggcggcaaggagc

SEQ ID NO: 456 - RNA, 31 nt, Artificial Sequence
  Synthetic Oligonucleotide
gcggaccccucgaugagggcggcggcaagga

SEQ ID NO: 457 - RNA, 31 nt, Artificial Sequence; identical to SEQ ID NO: 388
  Synthetic Oligonucleotide

SEQ ID NO: 458 - RNA, 31 nt, Artificial Sequence
  Synthetic Oligonucleotide
gaagacggaccccucgaugagggcggcggca

SEQ ID NO: 459 - RNA, 31 nt, Artificial Sequence
  Synthetic Oligonucleotide
ggaagacugaccccgcgaugagggcggcggc

SEQ ID NO: 460 - RNA, 31 nt, Artificial Sequence
  Synthetic Oligonucleotide
gaagaagacugaccccgcgaugagggcggcg

SEQ ID NO: 461 - RNA, 31 nt, Artificial Sequence
  Synthetic Oligonucleotide
gggaagaagacugaccccgcgaugagggcgg

SEQ ID NO: 462 - RNA, 31 nt, Artificial Sequence
  Synthetic Oligonucleotide
gcaggaagaagacugaccccgcgaugagggc

SEQ ID NO: 463 - RNA, 31 nt, Artificial Sequence
  Synthetic Oligonucleotide
gucguccuacaugcccuucucaugcauggac

SEQ ID NO: 464 - RNA, 31 nt, Artificial Sequence; identical to SEQ ID NO: 390
  Synthetic Oligonucleotide

SEQ ID NO: 465 - RNA, 31 nt, Artificial Sequence
  Synthetic Oligonucleotide
gcgggucguccuacaugcccuucucaugcau

SEQ ID NO: 466 - RNA, 31 nt, Artificial Sequence
  Synthetic Oligonucleotide
gcgcgggucguccuacaugcccuucucaugc

SEQ ID NO: 467 - RNA, 31 nt, Artificial Sequence
  Synthetic Oligonucleotide
gcgggucuuccgacaugcccuucucaugcau

SEQ ID NO: 468 - RNA, 31 nt, Artificial Sequence
  Synthetic Oligonucleotide
gcgcgggucuuccgacaugcccuucucaugc

SEQ ID NO: 469 - RNA, 31 nt, Artificial Sequence; identical to SEQ ID NO: 391
  Synthetic Oligonucleotide

SEQ ID NO: 470 - RNA, 31 nt, Artificial Sequence
  Synthetic Oligonucleotide
gguagcgcgggucuuccgacaugcccuucuc

SEQ ID NO: 471 - RNA, 31 nt, Artificial Sequence
  Synthetic Oligonucleotide
guguagcucgggucguccgacaugcccuucu

SEQ ID NO: 472 - RNA, 31 nt, Artificial Sequence
  Synthetic Oligonucleotide
gguuguagcucgggucguccgacaugcccuu

SEQ ID NO: 473 - RNA, 31 nt, Artificial Sequence
  Synthetic Oligonucleotide
gugguuguagcucgggucguccgacaugccc

SEQ ID NO: 474 - RNA, 31 nt, Artificial Sequence
  Synthetic Oligonucleotide
gucugguuguagcucgggucguccgacaugc

SEQ ID NO: 475 - RNA, 31 nt, Artificial Sequence
  Synthetic Oligonucleotide
guagcgcuggucguccgacaugcccuucuca

SEQ ID NO: 476 - RNA, 31 nt, Artificial Sequence
  Synthetic Oligonucleotide
guguagcgcuggucguccgacaugcccuucu

SEQ ID NO: 477 - RNA, 31 nt, Artificial Sequence; identical to SEQ ID NO: 393
  Synthetic Oligonucleotide

SEQ ID NO: 478 - RNA, 31 nt, Artificial Sequence
  Synthetic Oligonucleotide
gugguuguagcgcuggucguccgacaugccc

SEQ ID NO: 479 - RNA, 31 nt, Artificial Sequence
  Synthetic Oligonucleotide
gauuccacaguccagguaagacuguugcugc

SEQ ID NO: 480 - RNA, 31 nt, Artificial Sequence; identical to SEQ ID NO: 375
  Synthetic Oligonucleotide

SEQ ID NO: 481 - RNA, 31 nt, Artificial Sequence
  Synthetic Oligonucleotide
gauggauuccacaguccagguaagacuguug

SEQ ID NO: 482 - RNA, 31 nt, Artificial Sequence
  Synthetic Oligonucleotide
ggaauggauuccacaguccagguaagacugu

SEQ ID NO: 483 - RNA, 31 nt, Artificial Sequence
  Synthetic Oligonucleotide
gcagaaucgauuccagaguccagguaagacu

SEQ ID NO: 484 - RNA, 31 nt, Artificial Sequence
  Synthetic Oligonucleotide
gaccagaaucgauuccagaguccagguaaga

SEQ ID NO: 485 - RNA, 31 nt, Artificial Sequence
  Synthetic Oligonucleotide
ggcaccagaaucgauuccagaguccagguaa

SEQ ID NO: 486 - RNA, 31 nt, Artificial Sequence
  Synthetic Oligonucleotide
guggcaccagaaucgauuccagaguccaggu

SEQ ID NO: 487 - RNA, 31 nt, Artificial Sequence
  Synthetic Oligonucleotide
ggcaccacaauggauuccagaguccagguaa

SEQ ID NO: 488 - RNA, 31 nt, Artificial Sequence
  Synthetic Oligonucleotide
guggcaccacaauggauuccagaguccaggu

SEQ ID NO: 489 - RNA, 31 nt, Artificial Sequence
  Synthetic Oligonucleotide
gaguggcaccacaauggauuccagaguccag

SEQ ID NO: 490 - RNA, 31 nt, Artificial Sequence
  Synthetic Oligonucleotide
gguaguggcaccacaauggauuccagagucc

SEQ ID NO: 491 - RNA, 31 nt, Artificial Sequence
  Synthetic Oligonucleotide
ggcugugcuaguggcaccagaauggauucca

SEQ ID NO: 492 - RNA, 31 nt, Artificial Sequence
  Synthetic Oligonucleotide
ggagcugugcuaguggcaccagaauggauuc

SEQ ID NO: 493 - RNA, 31 nt, Artificial Sequence
  Synthetic Oligonucleotide
gaggagcugugcuaguggcaccagaauggau

SEQ ID NO: 494 - RNA, 31 nt, Artificial Sequence
  Synthetic Oligonucleotide
ggaaggagcugugcuaguggcaccagaaugg

SEQ ID NO: 495 - RNA, 31 nt, Artificial Sequence
  Synthetic Oligonucleotide
gagagaacgagcugugguaguggcaccagaa

SEQ ID NO: 496 - RNA, 31 nt, Artificial Sequence; identical to SEQ ID NO: 379
  Synthetic Oligonucleotide

SEQ ID NO: 497 - RNA, 31 nt, Artificial Sequence
  Synthetic Oligonucleotide
gacucagagaacgagcugugguaguggcacc

SEQ ID NO: 498 - RNA, 31 nt, Artificial Sequence
  Synthetic Oligonucleotide
gccacucagagaacgagcugugguaguggca

SEQ ID NO: 499 - RNA, 31 nt, Artificial Sequence
  Synthetic Oligonucleotide
ggagaagcagcugugguaguggcaccagaau

SEQ ID NO: 500 - RNA, 31 nt, Artificial Sequence
  Synthetic Oligonucleotide
gcagagaagcagcugugguaguggcaccaga

SEQ ID NO: 501 - RNA, 31 nt, Artificial Sequence
  Synthetic Oligonucleotide
gcucagagaagcagcugugguaguggcacca

SEQ ID NO: 502 - RNA, 31 nt, Artificial Sequence
  Synthetic Oligonucleotide
gcacucagagaagcagcugugguaguggcac

SEQ ID NO: 503 - RNA, 31 nt, Artificial Sequence
  Synthetic Oligonucleotide
gcucagacaaggagcugugguaguggcacca

SEQ ID NO: 504 - RNA, 31 nt, Artificial Sequence
  Synthetic Oligonucleotide
gcacucagacaaggagcugugguaguggcac

SEQ ID NO: 505 - RNA, 31 nt, Artificial Sequence; identical to SEQ ID NO: 381
  Synthetic Oligonucleotide

SEQ ID NO: 506 - RNA, 31 nt, Artificial Sequence
  Synthetic Oligonucleotide
guuaccacucagacaaggagcugugguagug

SEQ ID NO: 507 - RNA, 31 nt, Artificial Sequence
  Synthetic Oligonucleotide
guguguccagaauauccaagagacagguuuc

SEQ ID NO: 508 - RNA, 31 nt, Artificial Sequence
  Synthetic Oligonucleotide
ggcuguguccagaauauccaagagacagguu

SEQ ID NO: 509 - RNA, 31 nt, Artificial Sequence
  Synthetic Oligonucleotide
gcugcuguguccagaauauccaagagacagg

SEQ ID NO: 510 - RNA, 31 nt, Artificial Sequence
  Synthetic Oligonucleotide
gaccugcuguguccagaauauccaagagaca

SEQ ID NO: 511 - RNA, 31 nt, Artificial Sequence; identical to SEQ ID NO: 387
  Synthetic Oligonucleotide

SEQ ID NO: 512 - RNA, 31 nt, Artificial Sequence
  Synthetic Oligonucleotide
gucauauuccuccacaaaaugauucugaauu

SEQ ID NO: 513 - RNA, 31 nt, Artificial Sequence; identical to SEQ ID NO: 383
  Synthetic Oligonucleotide

SEQ ID NO: 514 - RNA, 31 nt, Artificial Sequence
  Synthetic Oligonucleotide
guggaucauauuccuccacaaaaugauucug

SEQ ID NO: 515 - RNA, 31 nt, Artificial Sequence
  Synthetic Oligonucleotide
ggccuaccccaccagcuccaacuaccacaag

SEQ ID NO: 516 - RNA, 31 nt, Artificial Sequence
  Synthetic Oligonucleotide
guugccuaccccaccagcuccaacuaccaca

SEQ ID NO: 517 - RNA, 31 nt, Artificial Sequence
  Synthetic Oligonucleotide
gucuugccuaccccaccagcuccaacuacca

SEQ ID NO: 518 - RNA, 31 nt, Artificial Sequence
  Synthetic Oligonucleotide
gacucuugccuaccccaccagcuccaacuac

SEQ ID NO: 519 - RNA, 31 nt, Artificial Sequence
  Synthetic Oligonucleotide
gcgucaacgcacucuugccuacgccaccagc

SEQ ID NO: 520 - RNA, 31 nt, Artificial Sequence
  Synthetic Oligonucleotide
gaucgucaacgcacucuugccuacgccacca

SEQ ID NO: 521 - RNA, 31 nt, Artificial Sequence; identical to SEQ ID NO: 385
  Synthetic Oligonucleotide

SEQ ID NO: 522 - RNA, 31 nt, Artificial Sequence
  Synthetic Oligonucleotide
gcuguaucgucaacgcacucuugccuacgcc

SEQ ID NO: 523 - RNA, 31 nt, Artificial Sequence
  Synthetic Oligonucleotide
gccccgccaugagggcggcggcaaggagcac

SEQ ID NO: 524 - RNA, 31 nt, Artificial Sequence
  Synthetic Oligonucleotide
ggaccccgccaugagggcggcggcaaggagc

SEQ ID NO: 525 - RNA, 31 nt, Artificial Sequence
  Synthetic Oligonucleotide
gcggaccccgccaugagggcggcggcaagga

SEQ ID NO: 526 - RNA, 31 nt, Artificial Sequence
  Synthetic Oligonucleotide
ggacggaccccgccaugagggcggcggcaag

SEQ ID NO: 527 - RNA, 31 nt, Artificial Sequence
  Synthetic Oligonucleotide
guguugccuucggagaggcgcagcauccaca

SEQ ID NO: 528 - RNA, 31 nt, Artificial Sequence
  Synthetic Oligonucleotide
gcauguugccuucggagaggcgcagcaucca

SEQ ID NO: 529 - RNA, 31 nt, Artificial Sequence
  Synthetic Oligonucleotide
guucauguugccuucggagaggcgcagcauc

SEQ ID NO: 530 - RNA, 31 nt, Artificial Sequence
  Synthetic Oligonucleotide
gccuucauguugccuucggagaggcgcagca

SEQ ID NO: 531 - RNA, 31 nt, Artificial Sequence
  Synthetic Oligonucleotide
ggaccccccgaugagggcggcggcaaggagc

SEQ ID NO: 532 - RNA, 31 nt, Artificial Sequence
  Synthetic Oligonucleotide
gcggaccccccgaugagggcggcggcaagga

SEQ ID NO: 533 - RNA, 31 nt, Artificial Sequence
  Synthetic Oligonucleotide
ggacggaccccccgaugagggcggcggcaag

SEQ ID NO: 534 - RNA, 31 nt, Artificial Sequence
  Synthetic Oligonucleotide
gaagacggaccccccgaugagggcggcggca

SEQ ID NO: 535 - RNA, 31 nt, Artificial Sequence
  Synthetic Oligonucleotide
ggaagaccgaccccgcgaugagggcggcggc

SEQ ID NO: 536 - RNA, 31 nt, Artificial Sequence
  Synthetic Oligonucleotide
gaagaagaccgaccccgcgaugagggcggcg

SEQ ID NO: 537 - RNA, 31 nt, Artificial Sequence; identical to SEQ ID NO: 389
  Synthetic Oligonucleotide

SEQ ID NO: 538 - RNA, 31 nt, Artificial Sequence
  Synthetic Oligonucleotide
gcaggaagaagaccgaccccgcgaugagggc

SEQ ID NO: 539 - RNA, 31 nt, Artificial Sequence
  Synthetic Oligonucleotide
gucgucccacaugcccuucucaugcauggac

SEQ ID NO: 540 - RNA, 31 nt, Artificial Sequence
  Synthetic Oligonucleotide
gggucgucccacaugcccuucucaugcaugg

SEQ ID NO: 541 - RNA, 31 nt, Artificial Sequence
  Synthetic Oligonucleotide
gcgggucgucccacaugcccuucucaugcau

SEQ ID NO: 542 - RNA, 31 nt, Artificial Sequence
  Synthetic Oligonucleotide
gcgcgggucgucccacaugcccuucucaugc

SEQ ID NO: 543 - RNA, 31 nt, Artificial Sequence
  Synthetic Oligonucleotide
gcggguccuccgacaugcccuucucaugcau

SEQ ID NO: 544 - RNA, 31 nt, Artificial Sequence
  Synthetic Oligonucleotide
gcgcggguccuccgacaugcccuucucaugc

SEQ ID NO: 545 - RNA, 31 nt, Artificial Sequence
  Synthetic Oligonucleotide
gagcgcggguccuccgacaugcccuucucau

SEQ ID NO: 546 - RNA, 31 nt, Artificial Sequence
  Synthetic Oligonucleotide
gguagcgcggguccuccgacaugcccuucuc

SEQ ID NO: 547 - RNA, 31 nt, Artificial Sequence
  Synthetic Oligonucleotide
guguagcccgggucguccgacaugcccuucu

SEQ ID NO: 548 - RNA, 31 nt, Artificial Sequence
  Synthetic Oligonucleotide
gguuguagcccgggucguccgacaugcccuu

SEQ ID NO: 549 - RNA, 31 nt, Artificial Sequence; identical to SEQ ID NO: 392
  Synthetic Oligonucleotide

SEQ ID NO: 550 - RNA, 31 nt, Artificial Sequence
  Synthetic Oligonucleotide
gucugguuguagcccgggucguccgacaugc

SEQ ID NO: 551 - RNA, 31 nt, Artificial Sequence
  Synthetic Oligonucleotide
guagcgccggucguccgacaugcccuucuca

SEQ ID NO: 552 - RNA, 31 nt, Artificial Sequence
  Synthetic Oligonucleotide
guguagcgccggucguccgacaugcccuucu

SEQ ID NO: 553 - RNA, 31 nt, Artificial Sequence
  Synthetic Oligonucleotide
gguuguagcgccggucguccgacaugcccuu

SEQ ID NO: 554 - RNA, 31 nt, Artificial Sequence
  Synthetic Oligonucleotide
gugguuguagcgccggucguccgacaugccc

SEQ ID NO: 555 - RNA, 31 nt, Artificial Sequence
  Synthetic Oligonucleotide
gugcauugucagugcgcuuuucccaacacca

SEQ ID NO: 556 - RNA, 31 nt, Artificial Sequence
  Synthetic Oligonucleotide
ggcugcauugucagugcgcuuuucccaacac

SEQ ID NO: 557 - RNA, 31 nt, Artificial Sequence
  Synthetic Oligonucleotide
guagcugcauugucagugcgcuuuucccaac

SEQ ID NO: 558 - RNA, 31 nt, Artificial Sequence
  Synthetic Oligonucleotide
gauuagcugcauugucagugcgcuuuuccca

SEQ ID NO: 559 - RNA, 31 nt, Artificial Sequence; identical to SEQ ID NO: 394
  Synthetic Oligonucleotide

SEQ ID NO: 560 - RNA, 31 nt, Artificial Sequence
  Synthetic Oligonucleotide
gugcuugaaauacuucuggauuaaauauugu

SEQ ID NO: 561 - RNA, 31 nt, Artificial Sequence
  Synthetic Oligonucleotide
gugugcuugaaauacuucuggauuaaauauu

SEQ ID NO: 562 - RNA, 31 nt, Artificial Sequence
  Synthetic Oligonucleotide
gucugugcuugaaauacuucuggauuaaaua

SEQ ID NO: 563 - RNA, 31 nt, Artificial Sequence
  Synthetic Oligonucleotide
gcaucugugcuugaaauacuucuggauuaaa

SEQ ID NO: 564 - RNA, 31 nt, Artificial Sequence
  Synthetic Oligonucleotide
ggccaucugugcuugaaauacuucuggauua

SEQ ID NO: 565 - RNA, 31 nt, Artificial Sequence
  Synthetic Oligonucleotide
gcucaaccucuugagcugucucagucgcaug

SEQ ID NO: 566 - RNA, 31 nt, Artificial Sequence
  Synthetic Oligonucleotide
ggucucaaccucuugagcugucucagucgca

SEQ ID NO: 567 - RNA, 31 nt, Artificial Sequence
  Synthetic Oligonucleotide
gucgucucaaccucuugagcugucucagucg

SEQ ID NO: 568 - RNA, 31 nt, Artificial Sequence
  Synthetic Oligonucleotide
ggcucgucucaaccucuugagcugucucagu

SEQ ID NO: 569 - RNA, 31 nt, Artificial Sequence
  Synthetic Oligonucleotide
gcagcucgucucaaccucuugagcugucuca

SEQ ID NO: 570 - RNA, 31 nt, Artificial Sequence
  Synthetic Oligonucleotide
gaccucuuggguugcuuccucuugagagagc

SEQ ID NO: 571 - RNA, 31 nt, Artificial Sequence
  Synthetic Oligonucleotide
ggaaccucuuggguugcuuccucuugagaga

SEQ ID NO: 572 - RNA, 31 nt, Artificial Sequence
  Synthetic Oligonucleotide
ggugaaccucuuggguugcuuccucuugaga

SEQ ID NO: 573 - RNA, 31 nt, Artificial Sequence
  Synthetic Oligonucleotide
gcggugaaccucuuggguugcuuccucuuga

SEQ ID NO: 574 - RNA, 31 nt, Artificial Sequence
  Synthetic Oligonucleotide
gcacggugaaccucuuggguugcuuccucuu

SEQ ID NO: 575 - RNA, 31 nt, Artificial Sequence
  Synthetic Oligonucleotide
gagcagagaugcagcuggagccaucaaacac

SEQ ID NO: 576 - RNA, 31 nt, Artificial Sequence
  Synthetic Oligonucleotide
gguagcagagaugcagcuggagccaucaaac

SEQ ID NO: 577 - RNA, 31 nt, Artificial Sequence
  Synthetic Oligonucleotide
guuguagcagagaugcagcuggagccaucaa

SEQ ID NO: 578 - RNA, 31 nt, Artificial Sequence
  Synthetic Oligonucleotide
guauuguagcagagaugcagcuggagccauc

SEQ ID NO: 579 - RNA, 31 nt, Artificial Sequence
  Synthetic Oligonucleotide
gacuauuguagcagagaugcagcuggagcca

SEQ ID NO: 580 - RNA, 31 nt, Artificial Sequence
  Synthetic Oligonucleotide
guguauugucagugcgcuuuucccaacacca

SEQ ID NO: 581 - RNA, 31 nt, Artificial Sequence
  Synthetic Oligonucleotide
ggcuguauugucagugcgcuuuucccaacac

SEQ ID NO: 582 - RNA, 31 nt, Artificial Sequence
  Synthetic Oligonucleotide
guagcuguauugucagugcgcuuuucccaac

SEQ ID NO: 583 - RNA, 31 nt, Artificial Sequence
  Synthetic Oligonucleotide
gauuagcuguauugucagugcgcuuuuccca

SEQ ID NO: 584 - RNA, 31 nt, Artificial Sequence
  Synthetic Oligonucleotide
gggauuagcuguauugucagugcgcuuuucc

SEQ ID NO: 585 - RNA, 31 nt, Artificial Sequence
  Synthetic Oligonucleotide
guguuugaaauacuucuggauuaaauauugu

SEQ ID NO: 586 - RNA, 31 nt, Artificial Sequence
  Synthetic Oligonucleotide
guguguuugaaauacuucuggauuaaauauu

SEQ ID NO: 587 - RNA, 31 nt, Artificial Sequence
  Synthetic Oligonucleotide
gucuguguuugaaauacuucuggauuaaaua

SEQ ID NO: 588 - RNA, 31 nt, Artificial Sequence
  Synthetic Oligonucleotide
gcaucuguguuugaaauacuucuggauuaaa

SEQ ID NO: 589 - RNA, 31 nt, Artificial Sequence; identical to SEQ ID NO: 395
  Synthetic Oligonucleotide

SEQ ID NO: 590 - RNA, 31 nt, Artificial Sequence
  Synthetic Oligonucleotide
gcuuaaccucuugagcugucucagucgcaug

SEQ ID NO: 591 - RNA, 31 nt, Artificial Sequence
  Synthetic Oligonucleotide
ggucuuaaccucuugagcugucucagucgca

SEQ ID NO: 592 - RNA, 31 nt, Artificial Sequence
  Synthetic Oligonucleotide
gucgucuuaaccucuugagcugucucagucg

SEQ ID NO: 593 - RNA, 31 nt, Artificial Sequence
  Synthetic Oligonucleotide
ggcucgucuuaaccucuugagcugucucagu

SEQ ID NO: 594 - RNA, 31 nt, Artificial Sequence; identical to SEQ ID NO: 396
  Synthetic Oligonucleotide

SEQ ID NO: 595 - RNA, 31 nt, Artificial Sequence
  Synthetic Oligonucleotide
gacuucuuggguugcuuccucuugagagagc

SEQ ID NO: 596 - RNA, 31 nt, Artificial Sequence
  Synthetic Oligonucleotide
ggaacuucuuggguugcuuccucuugagaga

SEQ ID NO: 597 - RNA, 31 nt, Artificial Sequence; identical to SEQ ID NO: 397
  Synthetic Oligonucleotide

SEQ ID NO: 598 - RNA, 31 nt, Artificial Sequence
  Synthetic Oligonucleotide
gcggugaacuucuuggguugcuuccucuuga

SEQ ID NO: 599 - RNA, 31 nt, Artificial Sequence
  Synthetic Oligonucleotide
gcacggugaacuucuuggguugcuuccucuu

SEQ ID NO: 600 - RNA, 31 nt, Artificial Sequence
  Synthetic Oligonucleotide
gaguagagaugcagcuggagccaucaaacac

SEQ ID NO: 601 - RNA, 31 nt, Artificial Sequence
  Synthetic Oligonucleotide
gguaguagagaugcagcuggagccaucaaac

SEQ ID NO: 602 - RNA, 31 nt, Artificial Sequence; identical to SEQ ID NO: 398
  Synthetic Oligonucleotide

SEQ ID NO: 603 - RNA, 31 nt, Artificial Sequence
  Synthetic Oligonucleotide
guauuguaguagagaugcagcuggagccauc

SEQ ID NO: 604 - RNA, 31 nt, Artificial Sequence
  Synthetic Oligonucleotide
gacuauuguaguagagaugcagcuggagcca

SEQ ID NO: 605 - RNA, 31 nt, Artificial Sequence
  Synthetic Oligonucleotide
guaucaucuucugcagccacugggaugauuu

SEQ ID NO: 606 - RNA, 31 nt, Artificial Sequence
  Synthetic Oligonucleotide
gucuccaccccaaaagcugugaucuucuccu

SEQ ID NO: 607 - RNA, 31 nt, Artificial Sequence
  Synthetic Oligonucleotide
ggaacucacccuuggccaagagcucacacuu

SEQ ID NO: 608 - RNA, 31 nt, Artificial Sequence
  Synthetic Oligonucleotide
ggagcccucaucaaggucuguacaagugaag

SEQ ID NO: 609 - RNA, 31 nt, Artificial Sequence
  Synthetic Oligonucleotide
gcuguggcggcauuugccggcaguccggcuu

SEQ ID NO: 610 - RNA, 31 nt, Artificial Sequence
  Synthetic Oligonucleotide
ggccuggcggguccccccaaccaccccaggc

SEQ ID NO: 611 - RNA, 31 nt, Artificial Sequence
  Synthetic Oligonucleotide
gagaagccuguucaucacguugacauacuga

SEQ ID NO: 612 - RNA, 31 nt, Artificial Sequence
  Synthetic Oligonucleotide
gcuccaaaccuaacucugcugcuuccacugc

SEQ ID NO: 613 - RNA, 31 nt, Artificial Sequence
  Synthetic Oligonucleotide
guggcaucucuugaggucaggaggggggcca

SEQ ID NO: 614 - RNA, 31 nt, Artificial Sequence
  Synthetic Oligonucleotide
gucuuuccgaguauacacuggcagugugaua

SEQ ID NO: 615 - RNA, 31 nt, Artificial Sequence
  Synthetic Oligonucleotide
gcuuuccaccugggccaggggaaucaagcac

SEQ ID NO: 616 - RNA, 31 nt, Artificial Sequence
  Synthetic Oligonucleotide
guucucccccuaguccccguuuuucuucucu

SEQ ID NO: 617 - RNA, 31 nt, Artificial Sequence
  Synthetic Oligonucleotide
guggacugccgcuccugcaccugcgccucca

SEQ ID NO: 618 - RNA, 31 nt, Artificial Sequence
  Synthetic Oligonucleotide
gaugaucaacgggcaggauguuuuuauaucu

SEQ ID NO: 619 - RNA, 31 nt, Artificial Sequence
  Synthetic Oligonucleotide
ggccccuagccggaugugggagauggggaag

SEQ ID NO: 620 - RNA, 31 nt, Artificial Sequence
  Synthetic Oligonucleotide
guguguaaccggcagaggcuguaguuucaau

SEQ ID NO: 621 - RNA, 31 nt, Artificial Sequence
  Synthetic Oligonucleotide
gccgcguccccucucuuggguucuuguacaa

SEQ ID NO: 622 - RNA, 31 nt, Artificial Sequence
  Synthetic Oligonucleotide
gcaucuguccuuucuacuguaucuucuauau

SEQ ID NO: 623 - RNA, 31 nt, Artificial Sequence
  Synthetic Oligonucleotide
gcaacagcccggguuaaguuaaucagguaga

SEQ ID NO: 624 - RNA, 31 nt, Artificial Sequence; identical to SEQ ID NO: 623
  Synthetic Oligonucleotide

SEQ ID NO: 625 - RNA, 31 nt, Artificial Sequence
  Synthetic Oligonucleotide
ggucccacugccgcugucgcuggggaucguc

SEQ ID NO: 626 - RNA, 31 nt, Artificial Sequence
  Synthetic Oligonucleotide
gucgccgaagcacuucuccuccucagggaag

SEQ ID NO: 627 - RNA, 31 nt, Artificial Sequence
  Synthetic Oligonucleotide
gucaucuucugcagccacugggaugauuucc

SEQ ID NO: 628 - RNA, 31 nt, Artificial Sequence; identical to SEQ ID NO: 605
  Synthetic Oligonucleotide

SEQ ID NO: 629 - RNA, 31 nt, Artificial Sequence
  Synthetic Oligonucleotide
guuuaucaucuucugcagccacugggaugau

SEQ ID NO: 630 - RNA, 31 nt, Artificial Sequence
  Synthetic Oligonucleotide
gcaccccaaaagcugugaucuucuccuucac

SEQ ID NO: 631 - RNA, 31 nt, Artificial Sequence
  Synthetic Oligonucleotide
guccaccccaaaagcugugaucuucuccuuc

SEQ ID NO: 632 - RNA, 31 nt, Artificial Sequence; identical to SEQ ID NO: 606
  Synthetic Oligonucleotide

SEQ ID NO: 633 - RNA, 31 nt, Artificial Sequence
  Synthetic Oligonucleotide
gucacccuuggccaagagcucacacuucagg

SEQ ID NO: 634 - RNA, 31 nt, Artificial Sequence
  Synthetic Oligonucleotide
gacucacccuuggccaagagcucacacuuca

SEQ ID NO: 635 - RNA, 31 nt, Artificial Sequence; identical to SEQ ID NO: 607
  Synthetic Oligonucleotide

SEQ ID NO: 636 - RNA, 31 nt, Artificial Sequence; identical to SEQ ID NO: 608
  Synthetic Oligonucleotide

SEQ ID NO: 637 - RNA, 31 nt, Artificial Sequence
  Synthetic Oligonucleotide
gcagagcccucaucaaggucuguacaaguga

SEQ ID NO: 638 - RNA, 31 nt, Artificial Sequence
  Synthetic Oligonucleotide
gcucagagcccucaucaaggucuguacaagu

SEQ ID NO: 639 - RNA, 31 nt, Artificial Sequence
  Synthetic Oligonucleotide
gguggcggcauuugccggcaguccggcuugg

SEQ ID NO: 640 - RNA, 31 nt, Artificial Sequence; identical to SEQ ID NO: 609
  Synthetic Oligonucleotide

SEQ ID NO: 641 - RNA, 31 nt, Artificial Sequence
  Synthetic Oligonucleotide
gcacuguggcggcauuugccggcaguccggc

SEQ ID NO: 642 - RNA, 31 nt, Artificial Sequence
  Synthetic Oligonucleotide
gcuggcggguccccccaaccaccccaggcac

SEQ ID NO: 643 - RNA, 31 nt, Artificial Sequence; identical to SEQ ID NO: 610
  Synthetic Oligonucleotide

SEQ ID NO: 644 - RNA, 31 nt, Artificial Sequence
  Synthetic Oligonucleotide
gccgccuggcggguccccccaaccaccccag

SEQ ID NO: 645 - RNA, 31 nt, Artificial Sequence
  Synthetic Oligonucleotide
gaagccuguucaucacguugacauacugauu

SEQ ID NO: 646 - RNA, 31 nt, Artificial Sequence; identical to SEQ ID NO: 611
  Synthetic Oligonucleotide

SEQ ID NO: 647 - RNA, 31 nt, Artificial Sequence
  Synthetic Oligonucleotide
gaaagaagccuguucaucacguugacauacu

SEQ ID NO: 648 - RNA, 31 nt, Artificial Sequence
  Synthetic Oligonucleotide
gaaaccuaacucugcugcuuccacugcucug

SEQ ID NO: 649 - RNA, 31 nt, Artificial Sequence
  Synthetic Oligonucleotide
gccaaaccuaacucugcugcuuccacugcuc

SEQ ID NO: 650 - RNA, 31 nt, Artificial Sequence; identical to SEQ ID NO: 612
  Synthetic Oligonucleotide

SEQ ID NO: 651 - RNA, 31 nt, Artificial Sequence
  Synthetic Oligonucleotide
gaucucuugaggucaggaggggggccacgau

SEQ ID NO: 652 - RNA, 31 nt, Artificial Sequence
  Synthetic Oligonucleotide
ggcaucucuugaggucaggaggggggccacg

SEQ ID NO: 653 - RNA, 31 nt, Artificial Sequence; identical to SEQ ID NO: 613
  Synthetic Oligonucleotide

SEQ ID NO: 654 - RNA, 31 nt, Artificial Sequence
  Synthetic Oligonucleotide
guuuccgaguauacacuggcagugugauauu

SEQ ID NO: 655 - RNA, 31 nt, Artificial Sequence; identical to SEQ ID NO: 614
  Synthetic Oligonucleotide

SEQ ID NO: 656 - RNA, 31 nt, Artificial Sequence
  Synthetic Oligonucleotide
ggcucuuuccgaguauacacuggcaguguga

SEQ ID NO: 657 - RNA, 31 nt, Artificial Sequence
  Synthetic Oligonucleotide
gccaccugggccaggggaaucaagcacuuug

SEQ ID NO: 658 - RNA, 31 nt, Artificial Sequence
  Synthetic Oligonucleotide
guuccaccugggccaggggaaucaagcacuu

SEQ ID NO: 659 - RNA, 31 nt, Artificial Sequence; identical to SEQ ID NO: 615
  Synthetic Oligonucleotide

SEQ ID NO: 660 - RNA, 31 nt, Artificial Sequence
  Synthetic Oligonucleotide
gcccccuaguccccguuuuucuucucucucu

SEQ ID NO: 661 - RNA, 31 nt, Artificial Sequence
  Synthetic Oligonucleotide
gcucccccuaguccccguuuuucuucucucu

SEQ ID NO: 662 - RNA, 31 nt, Artificial Sequence; identical to SEQ ID NO: 616
  Synthetic Oligonucleotide

SEQ ID NO: 663 - RNA, 31 nt, Artificial Sequence
  Synthetic Oligonucleotide
gcugccgcuccugcaccugcgccuccagcuu

SEQ ID NO: 664 - RNA, 31 nt, Artificial Sequence
  Synthetic Oligonucleotide
ggacugccgcuccugcaccugcgccuccagc

SEQ ID NO: 665 - RNA, 31 nt, Artificial Sequence; identical to SEQ ID NO: 617
  Synthetic Oligonucleotide

SEQ ID NO: 666 - RNA, 31 nt, Artificial Sequence
  Synthetic Oligonucleotide
gucaacgggcaggauguuuuuauaucuauuu

SEQ ID NO: 667 - RNA, 31 nt, Artificial Sequence
  Synthetic Oligonucleotide
ggaucaacgggcaggauguuuuuauaucuau

SEQ ID NO: 668 - RNA, 31 nt, Artificial Sequence; identical to SEQ ID NO: 618
  Synthetic Oligonucleotide

SEQ ID NO: 669 - RNA, 31 nt, Artificial Sequence; identical to SEQ ID NO: 619
  Synthetic Oligonucleotide

SEQ ID NO: 670 - RNA, 31 nt, Artificial Sequence
  Synthetic Oligonucleotide
ggggccccuagccggaugugggagaugggga

SEQ ID NO: 671 - RNA, 31 nt, Artificial Sequence
  Synthetic Oligonucleotide
gcagggccccuagccggaugugggagauggg

SEQ ID NO: 672 - RNA, 31 nt, Artificial Sequence
  Synthetic Oligonucleotide
guaaccggcagaggcuguaguuucaaugaga

SEQ ID NO: 673 - RNA, 31 nt, Artificial Sequence
  Synthetic Oligonucleotide
guguaaccggcagaggcuguaguuucaauga

SEQ ID NO: 674 - RNA, 31 nt, Artificial Sequence; identical to SEQ ID NO: 620
  Synthetic Oligonucleotide

SEQ ID NO: 675 - RNA, 31 nt, Artificial Sequence
  Synthetic Oligonucleotide
gguccccucucuuggguucuuguacaaggcg

SEQ ID NO: 676 - RNA, 31 nt, Artificial Sequence
  Synthetic Oligonucleotide
ggcguccccucucuuggguucuuguacaagg

SEQ ID NO: 677 - RNA, 31 nt, Artificial Sequence; identical to SEQ ID NO: 621
  Synthetic Oligonucleotide

SEQ ID NO: 678 - RNA, 31 nt, Artificial Sequence
  Synthetic Oligonucleotide
guguccuuucuacuguaucuucuauauggcc

SEQ ID NO: 679 - RNA, 31 nt, Artificial Sequence
  Synthetic Oligonucleotide
gucuguccuuucuacuguaucuucuauaugg

SEQ ID NO: 680 - RNA, 31 nt, Artificial Sequence; identical to SEQ ID NO: 622
  Synthetic Oligonucleotide

SEQ ID NO: 681 - RNA, 31 nt, Artificial Sequence
  Synthetic Oligonucleotide
gagcccggguuaaguuaaucagguagaagga

SEQ ID NO: 682 - RNA, 31 nt, Artificial Sequence
  Synthetic Oligonucleotide
gacagcccggguuaaguuaaucagguagaag

SEQ ID NO: 683 - RNA, 31 nt, Artificial Sequence; identical to SEQ ID NO: 623
  Synthetic Oligonucleotide

SEQ ID NO: 684 - RNA, 31 nt, Artificial Sequence
  Synthetic Oligonucleotide
ggucccgaaccuguucuucugugguaacggg

SEQ ID NO: 685 - RNA, 31 nt, Artificial Sequence
  Synthetic Oligonucleotide
gacgucccgaaccuguucuucugugguaacg

SEQ ID NO: 686 - RNA, 31 nt, Artificial Sequence
  Synthetic Oligonucleotide
gugacgucccgaaccuguucuucugugguaa

SEQ ID NO: 687 - RNA, 31 nt, Artificial Sequence
  Synthetic Oligonucleotide
gcccacugccgcugucgcuggggaucgucuc

SEQ ID NO: 688 - RNA, 31 nt, Artificial Sequence; identical to SEQ ID NO: 625
  Synthetic Oligonucleotide

SEQ ID NO: 689 - RNA, 31 nt, Artificial Sequence
  Synthetic Oligonucleotide
gcugucccacugccgcugucgcuggggaucg

SEQ ID NO: 690 - RNA, 31 nt, Artificial Sequence; identical to SEQ ID NO: 626
  Synthetic Oligonucleotide

SEQ ID NO: 691 - RNA, 31 nt, Artificial Sequence
  Synthetic Oligonucleotide
ggcucgccgaagcacuucuccuccucaggga

SEQ ID NO: 692 - RNA, 31 nt, Artificial Sequence
  Synthetic Oligonucleotide
ggggcucgccgaagcacuucuccuccucagg

SEQ ID NO: 693 - RNA, 31 nt, Artificial Sequence
  Synthetic Oligonucleotide
gccacguccuccauguccgcgcccagccggg

SEQ ID NO: 694 - RNA, 31 nt, Artificial Sequence
  Synthetic Oligonucleotide
ggcccacguccuccauguccgcgcccagccg

SEQ ID NO: 695 - RNA, 31 nt, Artificial Sequence
  Synthetic Oligonucleotide
gccgcccacguccuccauguccgcgcccagc

SEQ ID NO: 696 - RNA, 31 nt, Artificial Sequence
  Synthetic Oligonucleotide
gggccgcccacguccuccauguccgcgccca

SEQ ID NO: 697 - RNA, 31 nt, Artificial Sequence
  Synthetic Oligonucleotide
ggcggccgcccacguccuccauguccgcgcc

SEQ ID NO: 698 - RNA, 31 nt, Artificial Sequence
  Synthetic Oligonucleotide
gaggcggccgcccacguccuccauguccgcg

SEQ ID NO: 699 - RNA, 31 nt, Artificial Sequence
  Synthetic Oligonucleotide
gccaggcggccgcccacguccuccauguccg

SEQ ID NO: 700 - RNA, 31 nt, Artificial Sequence
  Synthetic Oligonucleotide
gcaccaggcggccgcccacguccuccauguc

SEQ ID NO: 701 - RNA, 31 nt, Artificial Sequence
  Synthetic Oligonucleotide
gccuucugcaggucaucggcaucgcggagga

SEQ ID NO: 702 - RNA, 31 nt, Artificial Sequence
  Synthetic Oligonucleotide
ggcccuucugcaggucaucggcaucgcggag

SEQ ID NO: 703 - RNA, 31 nt, Artificial Sequence
  Synthetic Oligonucleotide
gaggcccuucugcaggucaucggcaucgcgg

SEQ ID NO: 704 - RNA, 31 nt, Artificial Sequence
  Synthetic Oligonucleotide
gccaggcccuucugcaggucaucggcaucgc

SEQ ID NO: 705 - RNA, 31 nt, Artificial Sequence
  Synthetic Oligonucleotide
gugccaggcccuucugcaggucaucggcauc

SEQ ID NO: 706 - RNA, 31 nt, Artificial Sequence
  Synthetic Oligonucleotide
gacugccaggcccuucugcaggucaucggca

SEQ ID NO: 707 - RNA, 31 nt, Artificial Sequence
  Synthetic Oligonucleotide
gacacugccaggcccuucugcaggucaucgg

SEQ ID NO: 708 - RNA, 31 nt, Artificial Sequence
  Synthetic Oligonucleotide
gguacacugccaggcccuucugcaggucauc

SEQ ID NO: 709 - RNA, 50 nt, Artificial Sequence
  Synthetic Oligonucleotide
ucuuauggcaaccgcaugagccuugaacgcacucucacuacggugaugau

SEQ ID NO: 710 - RNA, 31 nt, Artificial Sequence
  Synthetic Oligonucleotide
gcuugcaagugccucauccaaaggcgcaaau

SEQ ID NO: 711 - RNA, 50 nt, Artificial Sequence
  Synthetic Oligonucleotide
aaacauugaacaccauuaguuaaaguagugacuaagguuggccauggaac

SEQ ID NO: 712 - protein, 22 aa, Gaussia species
TRGCLICLSHINRTPKMKKFIP

SEQ ID NO: 713 - RNA, 66 nt, Gaussia species
accaggggcugucugaucugccugucccacaucaaucgcacgcccaagaugaagaaguucauccca

SEQ ID NO: 714 - RNA, 29 nt, Gaussia species
ugccauugaugugggacaggcagaucaga

SEQ ID NO: 715 - protein, 17 aa, Artificial Sequence
  Synthetic Peptide
DSGIHSGATTTAPSLSG

SEQ ID NO: 716 - RNA, 57 nt, Artificial Sequence
  Synthetic Oligonucleotide
uaccuggacucuggaauccauucuggugccacuagcacagcuccuucucugaguggu

SEQ ID NO: 717 - RNA, 31 nt, Artificial Sequence; identical to SEQ ID NO: 378
  Synthetic Oligonucleotide

SEQ ID NO: 718 - RNA, 36 nt, Gaussia species; identical to SEQ ID NO: 65

SEQ ID NO: 719 - RNA, 66 nt, Gaussia species; identical to SEQ ID NO: 66

SEQ ID NO: 720 - RNA, 14 nt, Artificial Sequence
  Synthetic Oligonucleotide
uccccacauucgac

SEQ ID NO: 721 - RNA, 14 nt, Artificial Sequence
  Synthetic Oligonucleotide
ggccaaugugggga

SEQ ID NO: 722 - DNA, 36 bp, Gaussia species
tgcctgtcccacatcaatcgcacgcccaagatgaag

SEQ ID NO: 723 - DNA, 35 bp, Gaussia species
tgcctgtcccacatcaattgcacgcccaagatgag

SEQ ID NO: 724 - DNA, 35 bp, Gaussia species
tgcctgtcccacatcaattgcacgcccaagatgaa

SEQ ID NO: 725 - DNA, 35 bp, Gaussia species
tgcctgtcccacatcagttgcacgcccaagatgaa

SEQ ID NO: 726 - DNA, 35 bp, Gaussia species; identical to SEQ ID NO: 724

SEQ ID NO: 727 - DNA, 35 bp, Gaussia species
tgcctgtcccgcatcaattgcacgcccaagatgaa

SEQ ID NO: 728 - DNA, 35 bp, Gaussia species; identical to SEQ ID NO: 724

SEQ ID NO: 729 - DNA, 35 bp, Gaussia species
tgcctgtcccacatcaatcgcacgcccaagatgaa

SEQ ID NO: 730 - DNA, 35 bp, Gaussia species; identical to SEQ ID NO: 727

SEQ ID NO: 731 - DNA, 35 bp, Gaussia species; identical to SEQ ID NO: 724

SEQ ID NO: 732 - DNA, 35 bp, Gaussia species; identical to SEQ ID NO: 727

SEQ ID NO: 733 - DNA, 35 bp, Gaussia species; identical to SEQ ID NO: 729

SEQ ID NO: 734 - DNA, 35 bp, Gaussia species; identical to SEQ ID NO: 729

SEQ ID NO: 735 - DNA, 35 bp, Gaussia species; identical to SEQ ID NO: 724

SEQ ID NO: 736 - DNA, 35 bp, Gaussia species; identical to SEQ ID NO: 727

SEQ ID NO: 737 - DNA, 35 bp, Gaussia species; identical to SEQ ID NO: 725

SEQ ID NO: 738 - DNA, 35 bp, Gaussia species; identical to SEQ ID NO: 724

SEQ ID NO: 739 - DNA, 35 bp, Gaussia species
gcctgtcccacatcaattgcacgcccaggatgaag

SEQ ID NO: 740 - DNA, 35 bp, Gaussia species
gcctgtcccacatcagttgcacgcccaagatgaag

SEQ ID NO: 741 - DNA, 35 bp, Gaussia species
gcctgtcccgcatcaattgcacgcccaagatgaag

SEQ ID NO: 742 - DNA, 35 bp, Gaussia species
gcctgtcccacatcaattgcacgcccaagatgaag

SEQ ID NO: 743 - DNA, 35 bp, Gaussia species
gcctgtcccacatcaatcgcacgcccaagatgaag

SEQ ID NO: 744 - DNA, 35 bp, Gaussia species; identical to SEQ ID NO: 740

SEQ ID NO: 745 - DNA, 36 bp, Gaussia species; identical to SEQ ID NO: 722

SEQ ID NO: 746 - DNA, 35 bp, Gaussia species; identical to SEQ ID NO: 724

SEQ ID NO: 747 - DNA, 35 bp, Gaussia species; identical to SEQ ID NO: 724

SEQ ID NO: 748 - DNA, 35 bp, Gaussia species; identical to SEQ ID NO: 724

SEQ ID NO: 749 - DNA, 35 bp, Gaussia species; identical to SEQ ID NO: 724

SEQ ID NO: 750 - DNA, 35 bp, Gaussia species; identical to SEQ ID NO: 724

SEQ ID NO: 751 - DNA, 35 bp, Gaussia species; identical to SEQ ID NO: 724

SEQ ID NO: 752 - DNA, 35 bp, Gaussia species; identical to SEQ ID NO: 729

SEQ ID NO: 753 - DNA, 35 bp, Gaussia species; identical to SEQ ID NO: 724

SEQ ID NO: 754 - DNA, 35 bp, Gaussia species; identical to SEQ ID NO: 729

SEQ ID NO: 755 - DNA, 35 bp, Gaussia species; identical to SEQ ID NO: 724

SEQ ID NO: 756 - DNA, 35 bp, Gaussia species; identical to SEQ ID NO: 729

SEQ ID NO: 757 - DNA, 35 bp, Gaussia species; identical to SEQ ID NO: 729

SEQ ID NO: 758 - DNA, 35 bp, Gaussia species; identical to SEQ ID NO: 724

SEQ ID NO: 759 - DNA, 35 bp, Gaussia species; identical to SEQ ID NO: 724

SEQ ID NO: 760 - DNA, 35 bp, Gaussia species; identical to SEQ ID NO: 724

SEQ ID NO: 761 - DNA, 35 bp, Gaussia species; identical to SEQ ID NO: 729

SEQ ID NO: 762 - DNA, 35 bp, Gaussia species
gcctgtcccacatcaattgcacgcccaagattaag

SEQ ID NO: 763 - DNA, 35 bp, Gaussia species; identical to SEQ ID NO: 743

SEQ ID NO: 764 - DNA, 35 bp, Gaussia species; identical to SEQ ID NO: 742

SEQ ID NO: 765 - DNA, 35 bp, Gaussia species; identical to SEQ ID NO: 743

SEQ ID NO: 766 - DNA, 35 bp, Gaussia species; identical to SEQ ID NO: 742

SEQ ID NO: 767 - DNA, 35 bp, Gaussia species; identical to SEQ ID NO: 743

SEQ ID NO: 768 - protein, 17 aa, Artificial Sequence
  Synthetic Peptide
TCSNTIDLPMSPRTLDS

SEQ ID NO: 769 - RNA, 58 nt, Artificial Sequence
  Synthetic Oligonucleotide
caacgaccugcagcaauaccauugaccugccgaugucccccccgcacuuuagauucau

SEQ ID NO: 770 - RNA, 31 nt, Artificial Sequence; identical to SEQ ID NO: 400
  Synthetic Oligonucleotide

SEQ ID NO: 771 - RNA, 78 nt, Gaussia species
ugucugaucugccugucccacaucaaucgcacgcccaagaugaagaaguucaucccaggacgcugccacaccuacgaa

SEQ ID NO: 772 - RNA, 48 nt, Artificial Sequence
  Synthetic Oligonucleotide
aagagugccuugacgauacagcuaauucagaaucauuuuguggacgaa

SEQ ID NO: 773 - RNA, 60 nt, Artificial Sequence
  Synthetic Oligonucleotide
agucacuggcagcaacagucuuaccuggacucuggaauccauucuggugccacuaccaca

SEQ ID NO: 774 - RNA, 30 nt, Artificial Sequence
  Synthetic Oligonucleotide
cauucuggugccacuaccacagcuccuucu

SEQ ID NO: 775 - protein, 17 aa, Artificial Sequence
  Synthetic Peptide
PEADPGSAAPYLKTKFI

SEQ ID NO: 776 - DNA, 57 bp, Artificial Sequence; identical to SEQ ID NO: 70
  Synthetic Oligonucleotide

SEQ ID NO: 777 - protein, 17 aa, Artificial Sequence
  Synthetic Peptide
TCSNTIDLPMSPRTLDS

SEQ ID NO: 778 - DNA, 57 bp, Artificial Sequence; identical to SEQ ID NO: 73
  Synthetic Oligonucleotide

SEQ ID NO: 779 - protein, 15 aa, Artificial Sequence
  Synthetic Peptide
GSSLQKKLEELELGS

SEQ ID NO: 780 - RNA, 30 nt, Artificial Sequence; identical to SEQ ID NO: 310
  Synthetic Oligonucleotide

SEQ ID NO: 781 - RNA, 31 nt, Artificial Sequence; identical to SEQ ID NO: 311
  Synthetic Oligonucleotide

SEQ ID NO: 782 - RNA, 31 nt, Artificial Sequence; identical to SEQ ID NO: 312
  Synthetic Oligonucleotide

SEQ ID NO: 783 - RNA, 30 nt, Artificial Sequence; identical to SEQ ID NO: 313
  Synthetic Oligonucleotide

SEQ ID NO: 784 - RNA, 31 nt, Artificial Sequence; identical to SEQ ID NO: 314
  Synthetic Oligonucleotide

SEQ ID NO: 785 - RNA, 31 nt, Artificial Sequence; identical to SEQ ID NO: 315
  Synthetic Oligonucleotide

SEQ ID NO: 786 - RNA, 30 nt, Artificial Sequence; identical to SEQ ID NO: 316
  Synthetic Oligonucleotide

SEQ ID NO: 787 - RNA, 30 nt, Artificial Sequence; identical to SEQ ID NO: 317
  Synthetic Oligonucleotide

SEQ ID NO: 788 - RNA, 30 nt, Artificial Sequence; identical to SEQ ID NO: 318
  Synthetic Oligonucleotide

SEQ ID NO: 789 - RNA, 30 nt, Artificial Sequence; identical to SEQ ID NO: 319
  Synthetic Oligonucleotide

SEQ ID NO: 790 - RNA, 30 nt, Artificial Sequence; identical to SEQ ID NO: 320
  Synthetic Oligonucleotide

SEQ ID NO: 791 - RNA, 30 nt, Artificial Sequence; identical to SEQ ID NO: 321
  Synthetic Oligonucleotide

SEQ ID NO: 792 - RNA, 30 nt, Artificial Sequence; identical to SEQ ID NO: 322
  Synthetic Oligonucleotide

SEQ ID NO: 793 - RNA, 30 nt, Artificial Sequence; identical to SEQ ID NO: 323
  Synthetic Oligonucleotide

SEQ ID NO: 794 - RNA, 30 nt, Artificial Sequence; identical to SEQ ID NO: 324
  Synthetic Oligonucleotide

SEQ ID NO: 795 - RNA, 30 nt, Artificial Sequence; identical to SEQ ID NO: 325
  Synthetic Oligonucleotide

SEQ ID NO: 796 - RNA, 30 nt, Artificial Sequence; identical to SEQ ID NO: 326
  Synthetic Oligonucleotide

SEQ ID NO: 797 - RNA, 30 nt, Artificial Sequence; identical to SEQ ID NO: 327
  Synthetic Oligonucleotide

SEQ ID NO: 798 - RNA, 30 nt, Artificial Sequence; identical to SEQ ID NO: 328
  Synthetic Oligonucleotide

SEQ ID NO: 799 - RNA, 30 nt, Artificial Sequence; identical to SEQ ID NO: 329
  Synthetic Oligonucleotide

SEQ ID NO: 800 - RNA, 30 nt, Artificial Sequence; identical to SEQ ID NO: 330
  Synthetic Oligonucleotide

SEQ ID NO: 801 - RNA, 30 nt, Artificial Sequence; identical to SEQ ID NO: 331
  Synthetic Oligonucleotide

SEQ ID NO: 802 - RNA, 30 nt, Artificial Sequence; identical to SEQ ID NO: 332
  Synthetic Oligonucleotide

SEQ ID NO: 803 - RNA, 30 nt, Artificial Sequence; identical to SEQ ID NO: 333
  Synthetic Oligonucleotide

SEQ ID NO: 804 - RNA, 30 nt, Artificial Sequence; identical to SEQ ID NO: 334
  Synthetic Oligonucleotide

SEQ ID NO: 805 - RNA, 30 nt, Artificial Sequence; identical to SEQ ID NO: 335
  Synthetic Oligonucleotide

SEQ ID NO: 806 - RNA, 30 nt, Artificial Sequence; identical to SEQ ID NO: 336
  Synthetic Oligonucleotide

SEQ ID NO: 807 - RNA, 30 nt, Artificial Sequence; identical to SEQ ID NO: 337
  Synthetic Oligonucleotide

SEQ ID NO: 808 - RNA, 30 nt, Artificial Sequence; identical to SEQ ID NO: 338
  Synthetic Oligonucleotide

SEQ ID NO: 809 - RNA, 30 nt, Artificial Sequence; identical to SEQ ID NO: 339
  Synthetic Oligonucleotide

SEQ ID NO: 810 - RNA, 30 nt, Artificial Sequence; identical to SEQ ID NO: 340
  Synthetic Oligonucleotide

SEQ ID NO: 811 - RNA, 30 nt, Artificial Sequence; identical to SEQ ID NO: 341
  Synthetic Oligonucleotide

SEQ ID NO: 812 - RNA, 30 nt, Artificial Sequence; identical to SEQ ID NO: 342
  Synthetic Oligonucleotide

SEQ ID NO: 813 - RNA, 30 nt, Artificial Sequence; identical to SEQ ID NO: 343
  Synthetic Oligonucleotide

SEQ ID NO: 814 - RNA, 30 nt, Artificial Sequence; identical to SEQ ID NO: 344
  Synthetic Oligonucleotide

SEQ ID NO: 815 - RNA, 30 nt, Artificial Sequence; identical to SEQ ID NO: 345
  Synthetic Oligonucleotide

SEQ ID NO: 816 - RNA, 30 nt, Artificial Sequence; identical to SEQ ID NO: 346
  Synthetic Oligonucleotide

SEQ ID NO: 817 - RNA, 31 nt, Artificial Sequence; identical to SEQ ID NO: 347
  Synthetic Oligonucleotide

SEQ ID NO: 818 - RNA, 31 nt, Artificial Sequence; identical to SEQ ID NO: 348
  Synthetic Oligonucleotide

SEQ ID NO: 819 - RNA, 31 nt, Artificial Sequence; identical to SEQ ID NO: 349
  Synthetic Oligonucleotide

SEQ ID NO: 820 - RNA, 31 nt, Artificial Sequence; identical to SEQ ID NO: 350
  Synthetic Oligonucleotide

SEQ ID NO: 821 - RNA, 31 nt, Artificial Sequence; identical to SEQ ID NO: 351
  Synthetic Oligonucleotide

SEQ ID NO: 822 - RNA, 51 nt, Artificial Sequence; identical to SEQ ID NO: 352
  Synthetic Oligonucleotide

SEQ ID NO: 823 - RNA, 31 nt, Artificial Sequence; identical to SEQ ID NO: 353
  Synthetic Oligonucleotide

SEQ ID NO: 824 - RNA, 31 nt, Artificial Sequence; identical to SEQ ID NO: 354
  Synthetic Oligonucleotide

SEQ ID NO: 825 - RNA, 31 nt, Artificial Sequence; identical to SEQ ID NO: 355
  Synthetic Oligonucleotide

SEQ ID NO: 826 - RNA, 31 nt, Artificial Sequence; identical to SEQ ID NO: 356
  Synthetic Oligonucleotide

SEQ ID NO: 827 - RNA, 31 nt, Artificial Sequence; identical to SEQ ID NO: 357
  Synthetic Oligonucleotide

SEQ ID NO: 828 - RNA, 31 nt, Artificial Sequence; identical to SEQ ID NO: 358
  Synthetic Oligonucleotide

SEQ ID NO: 829 - RNA, 31 nt, Artificial Sequence; identical to SEQ ID NO: 359
  Synthetic Oligonucleotide

SEQ ID NO: 830 - RNA, 31 nt, Artificial Sequence; identical to SEQ ID NO: 360
  Synthetic Oligonucleotide

SEQ ID NO: 831 - RNA, 31 nt, Artificial Sequence; identical to SEQ ID NO: 361
  Synthetic Oligonucleotide

SEQ ID NO: 832 - RNA, 31 nt, Artificial Sequence; identical to SEQ ID NO: 362
  Synthetic Oligonucleotide

SEQ ID NO: 833 - RNA, 31 nt, Artificial Sequence; identical to SEQ ID NO: 363
  Synthetic Oligonucleotide

SEQ ID NO: 834 - RNA, 31 nt, Artificial Sequence; identical to SEQ ID NO: 364
  Synthetic Oligonucleotide

SEQ ID NO: 835 - RNA, 31 nt, Artificial Sequence; identical to SEQ ID NO: 365
  Synthetic Oligonucleotide

SEQ ID NO: 836 - RNA, 31 nt, Artificial Sequence; identical to SEQ ID NO: 366
  Synthetic Oligonucleotide

SEQ ID NO: 837 - RNA, 31 nt, Artificial Sequence; identical to SEQ ID NO: 367
  Synthetic Oligonucleotide

SEQ ID NO: 838 - RNA, 51 nt, Artificial Sequence; identical to SEQ ID NO: 368
  Synthetic Oligonucleotide

SEQ ID NO: 839 - RNA, 51 nt, Artificial Sequence; identical to SEQ ID NO: 369
  Synthetic Oligonucleotide

SEQ ID NO: 840 - RNA, 51 nt, Artificial Sequence; identical to SEQ ID NO: 370
  Synthetic Oligonucleotide

SEQ ID NO: 841 - RNA, 51 nt, Artificial Sequence; identical to SEQ ID NO: 371
  Synthetic Oligonucleotide

SEQ ID NO: 842 - RNA, 51 nt, Artificial Sequence; identical to SEQ ID NO: 372
  Synthetic Oligonucleotide

SEQ ID NO: 843 - RNA, 51 nt, Artificial Sequence; identical to SEQ ID NO: 373
  Synthetic Oligonucleotide

SEQ ID NO: 844 - RNA, 51 nt, Artificial Sequence; identical to SEQ ID NO: 374
  Synthetic Oligonucleotide

SEQ ID NO: 845 - RNA, 51 nt, Artificial Sequence
  Synthetic Oligonucleotide
gcaucuugggcgugcuauugaugugggacaggcagaucagacagccccugg

SEQ ID NO: 846 - RNA, 51 nt, Artificial Sequence
  Synthetic Oligonucleotide
guucaucuugggcgugcuauugaugugggacaggcagaucagacagccccu

SEQ ID NO: 847 - RNA, 51 nt, Artificial Sequence
  Synthetic Oligonucleotide
gucuucaucuugggcgugcuauugaugugggacaggcagaucagacagccc

SEQ ID NO: 848 - RNA, 51 nt, Artificial Sequence
  Synthetic Oligonucleotide
gcuucuucaucuugggcgugcuauugaugugggacaggcagaucagacagc

SEQ ID NO: 849 - RNA, 51 nt, Artificial Sequence
  Synthetic Oligonucleotide
gaacuucuucaucuugggcgugcuauugaugugggacaggcagaucagaca

SEQ ID NO: 850 - RNA, 51 nt, Artificial Sequence
  Synthetic Oligonucleotide
gugaacuucuucaucuugggcgugcuauugaugugggacaggcagaucaga

SEQ ID NO: 851 - RNA, 51 nt, Artificial Sequence
  Synthetic Oligonucleotide
ggaugaacuucuucaucuugggcgugcuauugaugugggacaggcagauca

SEQ ID NO: 852 - RNA, 51 nt, Artificial Sequence
  Synthetic Oligonucleotide
ggggaugaacuucuucaucuugggcgugcuauugaugugggacaggcagau

SEQ ID NO: 853 - RNA, 51 nt, Artificial Sequence
  Synthetic Oligonucleotide
gcugggaugaacuucuucaucuugggcgugcuauugaugugggacaggcag

SEQ ID NO: 854 - RNA, 51 nt, Artificial Sequence
  Synthetic Oligonucleotide
guccugggaugaacuucuucaucuugggcgugcuauugaugugggacaggc

SEQ ID NO: 855 - RNA, 51 nt, Artificial Sequence
  Synthetic Oligonucleotide
gcguccugggaugaacuucuucaucuugggcgugcuauugaugugggacag

SEQ ID NO: 856 - RNA, 51 nt, Artificial Sequence
  Synthetic Oligonucleotide
gagcguccugggaugaacuucuucaucuugggcgugcuauugaugugggac

SEQ ID NO: 857 - RNA, 51 nt, Artificial Sequence
  Synthetic Oligonucleotide
ggcagcguccugggaugaacuucuucaucuugggcgugcuauugauguggg

SEQ ID NO: 858 - RNA, 51 nt, Artificial Sequence
  Synthetic Oligonucleotide
guggcagcguccugggaugaacuucuucaucuugggcgugcuauugaugug

SEQ ID NO: 859 - RNA, 51 nt, Artificial Sequence
  Synthetic Oligonucleotide
guguggcagcguccugggaugaacuucuucaucuugggcgugcuauugaug

SEQ ID NO: 860 - RNA, 51 nt, Artificial Sequence
  Synthetic Oligonucleotide
ggguguggcagcguccugggaugaacuucuucaucuugggcgugcuauuga

SEQ ID NO: 861 - RNA, 51 nt, Artificial Sequence
  Synthetic Oligonucleotide
guagguguggcagcguccugggaugaacuucuucaucuugggcgugcuauu

SEQ ID NO: 862 - RNA, 51 nt, Artificial Sequence
  Synthetic Oligonucleotide
gcguagguguggcagcguccugggaugaacuucuucaucuugggcgugcua

SEQ ID NO: 863 - RNA, 30 nt, Artificial Sequence
  Synthetic Oligonucleotide
gugaaauugaugugggacaggcagaucaga

SEQ ID NO: 864 - RNA, 30 nt, Artificial Sequence
  Synthetic Oligonucleotide
gugcaauugaugugggacaggcagaucaga

SEQ ID NO: 865 - RNA, 30 nt, Artificial Sequence
  Synthetic Oligonucleotide
guggaauugaugugggacaggcagaucaga

SEQ ID NO: 866 - RNA, 30 nt, Artificial Sequence
  Synthetic Oligonucleotide
guguaauugaugugggacaggcagaucaga

SEQ ID NO: 867 - RNA, 30 nt, Artificial Sequence
  Synthetic Oligonucleotide
gugaauuugaugugggacaggcagaucaga

SEQ ID NO: 868 - RNA, 30 nt, Artificial Sequence
  Synthetic Oligonucleotide
gugcauuugaugugggacaggcagaucaga

SEQ ID NO: 869 - RNA, 30 nt, Artificial Sequence
  Synthetic Oligonucleotide
guggauuugaugugggacaggcagaucaga

SEQ ID NO: 870 - RNA, 30 nt, Artificial Sequence
  Synthetic Oligonucleotide
guguauuugaugugggacaggcagaucaga

SEQ ID NO: 871 - RNA, 30 nt, Artificial Sequence
  Synthetic Oligonucleotide
gugaacuugaugugggacaggcagaucaga

SEQ ID NO: 872 - RNA, 30 nt, Artificial Sequence
  Synthetic Oligonucleotide
gugcacuugaugugggacaggcagaucaga

SEQ ID NO: 873 - RNA, 30 nt, Artificial Sequence
  Synthetic Oligonucleotide
guggacuugaugugggacaggcagaucaga

SEQ ID NO: 874 - RNA, 30 nt, Artificial Sequence
  Synthetic Oligonucleotide
guguacuugaugugggacaggcagaucaga

SEQ ID NO: 875 - RNA, 30 nt, Artificial Sequence
  Synthetic Oligonucleotide
gugaaguugaugugggacaggcagaucaga

SEQ ID NO: 876 - RNA, 30 nt, Artificial Sequence
  Synthetic Oligonucleotide
gugcaguugaugugggacaggcagaucaga

SEQ ID NO: 877 - RNA, 30 nt, Artificial Sequence
  Synthetic Oligonucleotide
guggaguugaugugggacaggcagaucaga

SEQ ID NO: 878 - RNA, 30 nt, Artificial Sequence
  Synthetic Oligonucleotide
guguaguugaugugggacaggcagaucaga

SEQ ID NO: 879 - RNA, 30 nt, Artificial Sequence
  Synthetic Oligonucleotide
gugagauugaugugggacaggcagaucaga

SEQ ID NO: 880 - RNA, 30 nt, Artificial Sequence
  Synthetic Oligonucleotide
gugcgauugaugugggacaggcagaucaga

SEQ ID NO: 881 - RNA, 30 nt, Artificial Sequence
  Synthetic Oligonucleotide
gugggauugaugugggacaggcagaucaga

SEQ ID NO: 882 - RNA, 30 nt, Artificial Sequence
  Synthetic Oligonucleotide
gugugauugaugugggacaggcagaucaga

SEQ ID NO: 883 - RNA, 30 nt, Artificial Sequence
  Synthetic Oligonucleotide
gugaguuugaugugggacaggcagaucaga

SEQ ID NO: 884 - RNA, 30 nt, Artificial Sequence
  Synthetic Oligonucleotide
gugcguuugaugugggacaggcagaucaga

SEQ ID NO: 885 - RNA, 30 nt, Artificial Sequence
  Synthetic Oligonucleotide
guggguuugaugugggacaggcagaucaga

SEQ ID NO: 886 - RNA, 30 nt, Artificial Sequence
  Synthetic Oligonucleotide
guguguuugaugugggacaggcagaucaga

SEQ ID NO: 887 - RNA, 30 nt, Artificial Sequence
  Synthetic Oligonucleotide
gugagcuugaugugggacaggcagaucaga

SEQ ID NO: 888 - RNA, 30 nt, Artificial Sequence
  Synthetic Oligonucleotide
gugcgcuugaugugggacaggcagaucaga

SEQ ID NO: 889 - RNA, 30 nt, Artificial Sequence
  Synthetic Oligonucleotide
gugggcuugaugugggacaggcagaucaga

SEQ ID NO: 890 - RNA, 30 nt, Artificial Sequence
  Synthetic Oligonucleotide
gugugcuugaugugggacaggcagaucaga

SEQ ID NO: 891 - RNA, 30 nt, Artificial Sequence
  Synthetic Oligonucleotide
gugagguugaugugggacaggcagaucaga

SEQ ID NO: 892 - RNA, 30 nt, Artificial Sequence
  Synthetic Oligonucleotide
gugcgguugaugugggacaggcagaucaga

SEQ ID NO: 893 - RNA, 30 nt, Artificial Sequence
  Synthetic Oligonucleotide
gugggguugaugugggacaggcagaucaga

SEQ ID NO: 894 - RNA, 30 nt, Artificial Sequence
  Synthetic Oligonucleotide
gugugguugaugugggacaggcagaucaga

SEQ ID NO: 895 - RNA, 31 nt, Artificial Sequence
  Synthetic Oligonucleotide
guguugaugugggacaggcagaucagacagc

SEQ ID NO: 896 - RNA, 31 nt, Artificial Sequence
  Synthetic Oligonucleotide
ggcuguugaugugggacaggcagaucagaca

SEQ ID NO: 897 - RNA, 31 nt, Artificial Sequence
  Synthetic Oligonucleotide
ggugcuguugaugugggacaggcagaucaga

SEQ ID NO: 898 - RNA, 31 nt, Artificial Sequence
  Synthetic Oligonucleotide
ggcgugcuguugaugugggacaggcagauca

SEQ ID NO: 899 - RNA, 31 nt, Artificial Sequence
  Synthetic Oligonucleotide
ggggcgugcuguugaugugggacaggcagau

SEQ ID NO: 900 - RNA, 31 nt, Artificial Sequence
  Synthetic Oligonucleotide
guugggcgugcuguugaugugggacaggcag

SEQ ID NO: 901 - RNA, 31 nt, Artificial Sequence
  Synthetic Oligonucleotide
gucuugggcgugcuguugaugugggacaggc

SEQ ID NO: 902 - RNA, 31 nt, Artificial Sequence
  Synthetic Oligonucleotide
gcaucuugggcgugcuguugaugugggacag

SEQ ID NO: 903 - RNA, 31 nt, Artificial Sequence
  Synthetic Oligonucleotide
guucaucuugggcgugcuguugaugugggac

SEQ ID NO: 904 - RNA, 31 nt, Artificial Sequence
  Synthetic Oligonucleotide
gucuucaucuugggcgugcuguugauguggg

SEQ ID NO: 905 - RNA, 31 nt, Artificial Sequence
  Synthetic Oligonucleotide
gcuucuucaucuugggcgugcuguugaugug

SEQ ID NO: 906 - RNA, 31 nt, Artificial Sequence
  Synthetic Oligonucleotide
gaacuucuucaucuugggcgugcuguugaug

SEQ ID NO: 907 - RNA, 31 nt, Artificial Sequence
  Synthetic Oligonucleotide
gugaacuucuucaucuugggcgugcuguuga

SEQ ID NO: 908 - RNA, 31 nt, Artificial Sequence
  Synthetic Oligonucleotide
ggaugaacuucuucaucuugggcgugcuguu

SEQ ID NO: 909 - RNA, 31 nt, Artificial Sequence
  Synthetic Oligonucleotide
ggggaugaacuucuucaucuugggcgugcug

SEQ ID NO: 910 - RNA, 31 nt, Artificial Sequence; identical to SEQ ID NO: 375
  Synthetic Oligonucleotide

SEQ ID NO: 911 - RNA, 31 nt, Artificial Sequence; identical to SEQ ID NO: 376
  Synthetic Oligonucleotide

SEQ ID NO: 912 - RNA, 31 nt, Artificial Sequence; identical to SEQ ID NO: 377
  Synthetic Oligonucleotide

SEQ ID NO: 913 - RNA, 31 nt, Artificial Sequence; identical to SEQ ID NO: 378
  Synthetic Oligonucleotide

SEQ ID NO: 914 - RNA, 31 nt, Artificial Sequence; identical to SEQ ID NO: 379
  Synthetic Oligonucleotide

SEQ ID NO: 915 - RNA, 31 nt, Artificial Sequence; identical to SEQ ID NO: 380
  Synthetic Oligonucleotide

SEQ ID NO: 916 - RNA, 31 nt, Artificial Sequence; identical to SEQ ID NO: 381
  Synthetic Oligonucleotide

SEQ ID NO: 917 - RNA, 31 nt, Artificial Sequence; identical to SEQ ID NO: 382
  Synthetic Oligonucleotide

SEQ ID NO: 918 - RNA, 31 nt, Artificial Sequence; identical to SEQ ID NO: 383
  Synthetic Oligonucleotide

SEQ ID NO: 919 - RNA, 31 nt, Artificial Sequence; identical to SEQ ID NO: 384
  Synthetic Oligonucleotide

SEQ ID NO: 920 - RNA, 31 nt, Artificial Sequence; identical to SEQ ID NO: 385
  Synthetic Oligonucleotide

SEQ ID NO: 921 - RNA, 31 nt, Artificial Sequence; identical to SEQ ID NO: 386
  Synthetic Oligonucleotide

SEQ ID NO: 922 - RNA, 31 nt, Artificial Sequence; identical to SEQ ID NO: 387
  Synthetic Oligonucleotide

SEQ ID NO: 923 - RNA, 31 nt, Artificial Sequence; identical to SEQ ID NO: 388
  Synthetic Oligonucleotide

SEQ ID NO: 924 - RNA, 31 nt, Artificial Sequence; identical to SEQ ID NO: 389
  Synthetic Oligonucleotide

SEQ ID NO: 925 - RNA, 31 nt, Artificial Sequence; identical to SEQ ID NO: 390
  Synthetic Oligonucleotide

SEQ ID NO: 926 - RNA, 31 nt, Artificial Sequence; identical to SEQ ID NO: 391
  Synthetic Oligonucleotide

SEQ ID NO: 927 - RNA, 31 nt, Artificial Sequence; identical to SEQ ID NO: 392
  Synthetic Oligonucleotide

SEQ ID NO: 928 - RNA, 31 nt, Artificial Sequence; identical to SEQ ID NO: 393
  Synthetic Oligonucleotide

SEQ ID NO: 929 - RNA, 31 nt, Artificial Sequence; identical to SEQ ID NO: 394
  Synthetic Oligonucleotide

SEQ ID NO: 930 - RNA, 31 nt, Artificial Sequence; identical to SEQ ID NO: 395
  Synthetic Oligonucleotide

SEQ ID NO: 931 - RNA, 31 nt, Artificial Sequence; identical to SEQ ID NO: 396
  Synthetic Oligonucleotide

SEQ ID NO: 932 - RNA, 31 nt, Artificial Sequence; identical to SEQ ID NO: 397
  Synthetic Oligonucleotide

SEQ ID NO: 933 - RNA, 31 nt, Artificial Sequence; identical to SEQ ID NO: 398
  Synthetic Oligonucleotide

SEQ ID NO: 934 - RNA, 31 nt, Artificial Sequence; identical to SEQ ID NO: 403
  Synthetic Oligonucleotide

SEQ ID NO: 935 - RNA, 31 nt, Artificial Sequence; identical to SEQ ID NO: 404
  Synthetic Oligonucleotide

SEQ ID NO: 936 - RNA, 31 nt, Artificial Sequence; identical to SEQ ID NO: 405
  Synthetic Oligonucleotide

SEQ ID NO: 937 - RNA, 31 nt, Artificial Sequence; identical to SEQ ID NO: 406
  Synthetic Oligonucleotide

SEQ ID NO: 938 - RNA, 31 nt, Artificial Sequence; identical to SEQ ID NO: 407
  Synthetic Oligonucleotide

SEQ ID NO: 939 - RNA, 31 nt, Artificial Sequence; identical to SEQ ID NO: 376
  Synthetic Oligonucleotide

SEQ ID NO: 940 - RNA, 31 nt, Artificial Sequence; identical to SEQ ID NO: 409
  Synthetic Oligonucleotide

SEQ ID NO: 941 - RNA, 31 nt, Artificial Sequence; identical to SEQ ID NO: 410
  Synthetic Oligonucleotide

SEQ ID NO: 942 - RNA, 31 nt, Artificial Sequence; identical to SEQ ID NO: 411
  Synthetic Oligonucleotide

SEQ ID NO: 943 - RNA, 31 nt, Artificial Sequence; identical to SEQ ID NO: 377
  Synthetic Oligonucleotide

SEQ ID NO: 944 - RNA, 31 nt, Artificial Sequence; identical to SEQ ID NO: 413
  Synthetic Oligonucleotide

SEQ ID NO: 945 - RNA, 31 nt, Artificial Sequence; identical to SEQ ID NO: 414
  Synthetic Oligonucleotide

SEQ ID NO: 946 - RNA, 31 nt, Artificial Sequence; identical to SEQ ID NO: 415
  Synthetic Oligonucleotide

SEQ ID NO: 947 - RNA, 31 nt, Artificial Sequence; identical to SEQ ID NO: 416
  Synthetic Oligonucleotide

SEQ ID NO: 948 - RNA, 31 nt, Artificial Sequence; identical to SEQ ID NO: 378
  Synthetic Oligonucleotide

SEQ ID NO: 949 - RNA, 31 nt, Artificial Sequence; identical to SEQ ID NO: 418
  Synthetic Oligonucleotide

SEQ ID NO: 950 - RNA, 31 nt, Artificial Sequence; identical to SEQ ID NO: 419
  Synthetic Oligonucleotide

SEQ ID NO: 951 - RNA, 31 nt, Artificial Sequence; identical to SEQ ID NO: 420
  Synthetic Oligonucleotide

SEQ ID NO: 952 - RNA, 31 nt, Artificial Sequence; identical to SEQ ID NO: 421
  Synthetic Oligonucleotide

SEQ ID NO: 953 - RNA, 31 nt, Artificial Sequence; identical to SEQ ID NO: 422
  Synthetic Oligonucleotide

SEQ ID NO: 954 - RNA, 31 nt, Artificial Sequence; identical to SEQ ID NO: 423
  Synthetic Oligonucleotide

SEQ ID NO: 955 - RNA, 31 nt, Artificial Sequence; identical to SEQ ID NO: 424
  Synthetic Oligonucleotide

SEQ ID NO: 956 - RNA, 31 nt, Artificial Sequence; identical to SEQ ID NO: 380
  Synthetic Oligonucleotide

SEQ ID NO: 957 - RNA, 31 nt, Artificial Sequence; identical to SEQ ID NO: 426
  Synthetic Oligonucleotide

SEQ ID NO: 958 - RNA, 31 nt, Artificial Sequence; identical to SEQ ID NO: 427
  Synthetic Oligonucleotide

SEQ ID NO: 959 - RNA, 31 nt, Artificial Sequence; identical to SEQ ID NO: 428
  Synthetic Oligonucleotide

SEQ ID NO: 960 - RNA, 31 nt, Artificial Sequence; identical to SEQ ID NO: 429
  Synthetic Oligonucleotide

SEQ ID NO: 961 - RNA, 31 nt, Artificial Sequence; identical to SEQ ID NO: 430
  Synthetic Oligonucleotide

SEQ ID NO: 962 - RNA, 31 nt, Artificial Sequence; identical to SEQ ID NO: 382
  Synthetic Oligonucleotide

SEQ ID NO: 963 - RNA, 31 nt, Artificial Sequence; identical to SEQ ID NO: 432
  Synthetic Oligonucleotide

SEQ ID NO: 964 - RNA, 31 nt, Artificial Sequence; identical to SEQ ID NO: 433
  Synthetic Oligonucleotide

SEQ ID NO: 965 - RNA, 31 nt, Artificial Sequence; identical to SEQ ID NO: 434
  Synthetic Oligonucleotide

SEQ ID NO: 966 - RNA, 31 nt, Artificial Sequence; identical to SEQ ID NO: 435
  Synthetic Oligonucleotide

SEQ ID NO: 967 - RNA, 31 nt, Artificial Sequence; identical to SEQ ID NO: 436
  Synthetic Oligonucleotide

SEQ ID NO: 968 - RNA, 31 nt, Artificial Sequence; identical to SEQ ID NO: 437
  Synthetic Oligonucleotide

SEQ ID NO: 969 - RNA, 31 nt, Artificial Sequence; identical to SEQ ID NO: 438
  Synthetic Oligonucleotide

SEQ ID NO: 970 - RNA, 31 nt, Artificial Sequence; identical to SEQ ID NO: 439
  Synthetic Oligonucleotide

SEQ ID NO: 971 - RNA, 31 nt, Artificial Sequence; identical to SEQ ID NO: 440
  Synthetic Oligonucleotide

SEQ ID NO: 972 - RNA, 31 nt, Artificial Sequence; identical to SEQ ID NO: 384
  Synthetic Oligonucleotide

SEQ ID NO: 973 - RNA, 31 nt, Artificial Sequence; identical to SEQ ID NO: 442
  Synthetic Oligonucleotide

SEQ ID NO: 974 - RNA, 31 nt, Artificial Sequence; identical to SEQ ID NO: 443
  Synthetic Oligonucleotide

SEQ ID NO: 975 - RNA, 31 nt, Artificial Sequence; identical to SEQ ID NO: 444
  Synthetic Oligonucleotide

SEQ ID NO: 976 - RNA, 31 nt, Artificial Sequence; identical to SEQ ID NO: 445
  Synthetic Oligonucleotide

SEQ ID NO: 977 - RNA, 31 nt, Artificial Sequence; identical to SEQ ID NO: 446
  Synthetic Oligonucleotide

SEQ ID NO: 978 - RNA, 31 nt, Artificial Sequence; identical to SEQ ID NO: 447
  Synthetic Oligonucleotide

SEQ ID NO: 979 - RNA, 31 nt, Artificial Sequence; identical to SEQ ID NO: 448
  Synthetic Oligonucleotide

SEQ ID NO: 980 - RNA, 31 nt, Artificial Sequence; identical to SEQ ID NO: 386
  Synthetic Oligonucleotide

SEQ ID NO: 981 - RNA, 31 nt, Artificial Sequence; identical to SEQ ID NO: 450
  Synthetic Oligonucleotide

SEQ ID NO: 982 - RNA, 31 nt, Artificial Sequence; identical to SEQ ID NO: 451
  Synthetic Oligonucleotide

SEQ ID NO: 983 - RNA, 31 nt, Artificial Sequence; identical to SEQ ID NO: 452
  Synthetic Oligonucleotide

SEQ ID NO: 984 - RNA, 31 nt, Artificial Sequence; identical to SEQ ID NO: 453
  Synthetic Oligonucleotide

SEQ ID NO: 985 - RNA, 31 nt, Artificial Sequence; identical to SEQ ID NO: 454
  Synthetic Oligonucleotide

SEQ ID NO: 986 - RNA, 31 nt, Artificial Sequence; identical to SEQ ID NO: 455
  Synthetic Oligonucleotide

SEQ ID NO: 987 - RNA, 31 nt, Artificial Sequence; identical to SEQ ID NO: 456
  Synthetic Oligonucleotide

SEQ ID NO: 988 - RNA, 31 nt, Artificial Sequence; identical to SEQ ID NO: 388
  Synthetic Oligonucleotide

SEQ ID NO: 989 - RNA, 31 nt, Artificial Sequence; identical to SEQ ID NO: 458
  Synthetic Oligonucleotide

SEQ ID NO: 990 - RNA, 31 nt, Artificial Sequence; identical to SEQ ID NO: 459
  Synthetic Oligonucleotide

SEQ ID NO: 991 - RNA, 31 nt, Artificial Sequence; identical to SEQ ID NO: 460
  Synthetic Oligonucleotide

SEQ ID NO: 992 - RNA, 31 nt, Artificial Sequence; identical to SEQ ID NO: 461
  Synthetic Oligonucleotide

SEQ ID NO: 993 - RNA, 31 nt, Artificial Sequence; identical to SEQ ID NO: 462
  Synthetic Oligonucleotide

SEQ ID NO: 994 - RNA, 31 nt, Artificial Sequence; identical to SEQ ID NO: 463
  Synthetic Oligonucleotide

SEQ ID NO: 995 - RNA, 31 nt, Artificial Sequence; identical to SEQ ID NO: 390
  Synthetic Oligonucleotide

SEQ ID NO: 996 - RNA, 31 nt, Artificial Sequence; identical to SEQ ID NO: 465
  Synthetic Oligonucleotide

SEQ ID NO: 997 - RNA, 31 nt, Artificial Sequence; identical to SEQ ID NO: 466
  Synthetic Oligonucleotide

SEQ ID NO: 998 - RNA, 31 nt, Artificial Sequence; identical to SEQ ID NO: 467
  Synthetic Oligonucleotide

SEQ ID NO: 999 - RNA, 31 nt, Artificial Sequence; identical to SEQ ID NO: 468
  Synthetic Oligonucleotide

SEQ ID NO: 1000 - RNA, 31 nt, Artificial Sequence; identical to SEQ ID NO: 391
  Synthetic Oligonucleotide

SEQ ID NO: 1001 - RNA, 31 nt, Artificial Sequence; identical to SEQ ID NO: 470
  Synthetic Oligonucleotide

SEQ ID NO: 1002 - RNA, 31 nt, Artificial Sequence; identical to SEQ ID NO: 471
  Synthetic Oligonucleotide

SEQ ID NO: 1003 - RNA, 31 nt, Artificial Sequence; identical to SEQ ID NO: 472
  Synthetic Oligonucleotide

SEQ ID NO: 1004 - RNA, 31 nt, Artificial Sequence; identical to SEQ ID NO: 473
  Synthetic Oligonucleotide

SEQ ID NO: 1005 - RNA, 31 nt, Artificial Sequence; identical to SEQ ID NO: 474
  Synthetic Oligonucleotide

SEQ ID NO: 1006 - RNA, 31 nt, Artificial Sequence; identical to SEQ ID NO: 475
  Synthetic Oligonucleotide

SEQ ID NO: 1007 - RNA, 31 nt, Artificial Sequence; identical to SEQ ID NO: 476
  Synthetic Oligonucleotide

SEQ ID NO: 1008 - RNA, 31 nt, Artificial Sequence; identical to SEQ ID NO: 393
  Synthetic Oligonucleotide

SEQ ID NO: 1009 - RNA, 31 nt, Artificial Sequence; identical to SEQ ID NO: 478
  Synthetic Oligonucleotide

SEQ ID NO: 1010 - RNA, 31 nt, Artificial Sequence; identical to SEQ ID NO: 479
  Synthetic Oligonucleotide

SEQ ID NO: 1011 - RNA, 31 nt, Artificial Sequence; identical to SEQ ID NO: 375
  Synthetic Oligonucleotide

SEQ ID NO: 1012 - RNA, 31 nt, Artificial Sequence; identical to SEQ ID NO: 481
  Synthetic Oligonucleotide

SEQ ID NO: 1013 - RNA, 31 nt, Artificial Sequence; identical to SEQ ID NO: 482
  Synthetic Oligonucleotide

SEQ ID NO: 1014 - RNA, 31 nt, Artificial Sequence; identical to SEQ ID NO: 483
  Synthetic Oligonucleotide

SEQ ID NO: 1015 - RNA, 31 nt, Artificial Sequence; identical to SEQ ID NO: 484
  Synthetic Oligonucleotide

SEQ ID NO: 1016 - RNA, 31 nt, Artificial Sequence; identical to SEQ ID NO: 485
  Synthetic Oligonucleotide

SEQ ID NO: 1017 - RNA, 31 nt, Artificial Sequence; identical to SEQ ID NO: 486
  Synthetic Oligonucleotide

SEQ ID NO: 1018 - RNA, 31 nt, Artificial Sequence; identical to SEQ ID NO: 487
  Synthetic Oligonucleotide

SEQ ID NO: 1019 - RNA, 31 nt, Artificial Sequence; identical to SEQ ID NO: 488
  Synthetic Oligonucleotide

SEQ ID NO: 1020 - RNA, 31 nt, Artificial Sequence; identical to SEQ ID NO: 489
  Synthetic Oligonucleotide

SEQ ID NO: 1021 - RNA, 31 nt, Artificial Sequence; identical to SEQ ID NO: 490
  Synthetic Oligonucleotide

SEQ ID NO: 1022 - RNA, 31 nt, Artificial Sequence; identical to SEQ ID NO: 491
  Synthetic Oligonucleotide

SEQ ID NO: 1023 - RNA, 31 nt, Artificial Sequence; identical to SEQ ID NO: 492
  Synthetic Oligonucleotide

SEQ ID NO: 1024 - RNA, 31 nt, Artificial Sequence; identical to SEQ ID NO: 493
  Synthetic Oligonucleotide

SEQ ID NO: 1025 - RNA, 31 nt, Artificial Sequence; identical to SEQ ID NO: 494
  Synthetic Oligonucleotide

SEQ ID NO: 1026 - RNA, 31 nt, Artificial Sequence; identical to SEQ ID NO: 495
  Synthetic Oligonucleotide

SEQ ID NO: 1027 - RNA, 31 nt, Artificial Sequence; identical to SEQ ID NO: 379
  Synthetic Oligonucleotide

SEQ ID NO: 1028 - RNA, 31 nt, Artificial Sequence; identical to SEQ ID NO: 497
  Synthetic Oligonucleotide

SEQ ID NO: 1029 - RNA, 31 nt, Artificial Sequence; identical to SEQ ID NO: 498
  Synthetic Oligonucleotide

SEQ ID NO: 1030 - RNA, 31 nt, Artificial Sequence; identical to SEQ ID NO: 499
  Synthetic Oligonucleotide

SEQ ID NO: 1031 - RNA, 31 nt, Artificial Sequence; identical to SEQ ID NO: 500
  Synthetic Oligonucleotide

SEQ ID NO: 1032 - RNA, 31 nt, Artificial Sequence; identical to SEQ ID NO: 501
  Synthetic Oligonucleotide

SEQ ID NO: 1033 - RNA, 31 nt, Artificial Sequence; identical to SEQ ID NO: 502
  Synthetic Oligonucleotide

SEQ ID NO: 1034 - RNA, 31 nt, Artificial Sequence; identical to SEQ ID NO: 503
  Synthetic Oligonucleotide

SEQ ID NO: 1035 - RNA, 31 nt, Artificial Sequence; identical to SEQ ID NO: 504
  Synthetic Oligonucleotide

SEQ ID NO: 1036 - RNA, 31 nt, Artificial Sequence; identical to SEQ ID NO: 381
  Synthetic Oligonucleotide

SEQ ID NO: 1037 - RNA, 31 nt, Artificial Sequence; identical to SEQ ID NO: 506
  Synthetic Oligonucleotide

SEQ ID NO: 1038 - RNA, 31 nt, Artificial Sequence; identical to SEQ ID NO: 507
  Synthetic Oligonucleotide

SEQ ID NO: 1039 - RNA, 21 nt, Artificial Sequence
  Synthetic Oligonucleotide
ggcuguguccagaauauccaa

SEQ ID NO: 1040 - RNA, 31 nt, Artificial Sequence; identical to SEQ ID NO: 509
  Synthetic Oligonucleotide

SEQ ID NO: 1041 - RNA, 31 nt, Artificial Sequence; identical to SEQ ID NO: 510
  Synthetic Oligonucleotide

SEQ ID NO: 1042 - RNA, 31 nt, Artificial Sequence; identical to SEQ ID NO: 387
  Synthetic Oligonucleotide

SEQ ID NO: 1043 - RNA, 31 nt, Artificial Sequence; identical to SEQ ID NO: 512
  Synthetic Oligonucleotide

SEQ ID NO: 1044 - RNA, 31 nt, Artificial Sequence; identical to SEQ ID NO: 383
  Synthetic Oligonucleotide

SEQ ID NO: 1045 - RNA, 31 nt, Artificial Sequence; identical to SEQ ID NO: 514
  Synthetic Oligonucleotide

SEQ ID NO: 1046 - RNA, 31 nt, Artificial Sequence; identical to SEQ ID NO: 515
  Synthetic Oligonucleotide

SEQ ID NO: 1047 - RNA, 31 nt, Artificial Sequence; identical to SEQ ID NO: 516
  Synthetic Oligonucleotide

SEQ ID NO: 1048 - RNA, 31 nt, Artificial Sequence; identical to SEQ ID NO: 517
  Synthetic Oligonucleotide

SEQ ID NO: 1049 - RNA, 31 nt, Artificial Sequence; identical to SEQ ID NO: 518
  Synthetic Oligonucleotide

SEQ ID NO: 1050 - RNA, 31 nt, Artificial Sequence; identical to SEQ ID NO: 519
  Synthetic Oligonucleotide

SEQ ID NO: 1051 - RNA, 31 nt, Artificial Sequence; identical to SEQ ID NO: 520
  Synthetic Oligonucleotide

SEQ ID NO: 1052 - RNA, 31 nt, Artificial Sequence; identical to SEQ ID NO: 385
  Synthetic Oligonucleotide

SEQ ID NO: 1053 - RNA, 31 nt, Artificial Sequence; identical to SEQ ID NO: 522
  Synthetic Oligonucleotide

SEQ ID NO: 1054 - RNA, 31 nt, Artificial Sequence; identical to SEQ ID NO: 523
  Synthetic Oligonucleotide

SEQ ID NO: 1055 - RNA, 31 nt, Artificial Sequence; identical to SEQ ID NO: 524
  Synthetic Oligonucleotide

SEQ ID NO: 1056 - RNA, 31 nt, Artificial Sequence; identical to SEQ ID NO: 525
  Synthetic Oligonucleotide

SEQ ID NO: 1057 - RNA, 31 nt, Artificial Sequence; identical to SEQ ID NO: 526
  Synthetic Oligonucleotide

SEQ ID NO: 1058 - RNA, 31 nt, Artificial Sequence; identical to SEQ ID NO: 527
  Synthetic Oligonucleotide

SEQ ID NO: 1059 - RNA, 31 nt, Artificial Sequence; identical to SEQ ID NO: 528
  Synthetic Oligonucleotide

SEQ ID NO: 1060 - RNA, 31 nt, Artificial Sequence; identical to SEQ ID NO: 529
  Synthetic Oligonucleotide

SEQ ID NO: 1061 - RNA, 31 nt, Artificial Sequence; identical to SEQ ID NO: 530
  Synthetic Oligonucleotide

SEQ ID NO: 1062 - RNA, 31 nt, Artificial Sequence; identical to SEQ ID NO: 531
  Synthetic Oligonucleotide

SEQ ID NO: 1063 - RNA, 31 nt, Artificial Sequence; identical to SEQ ID NO: 532
  Synthetic Oligonucleotide

SEQ ID NO: 1064 - RNA, 31 nt, Artificial Sequence; identical to SEQ ID NO: 533
  Synthetic Oligonucleotide

SEQ ID NO: 1065 - RNA, 31 nt, Artificial Sequence; identical to SEQ ID NO: 534
  Synthetic Oligonucleotide

SEQ ID NO: 1066 - RNA, 31 nt, Artificial Sequence; identical to SEQ ID NO: 535
  Synthetic Oligonucleotide

SEQ ID NO: 1067 - RNA, 31 nt, Artificial Sequence; identical to SEQ ID NO: 536
  Synthetic Oligonucleotide

SEQ ID NO: 1068 - RNA, 31 nt, Artificial Sequence; identical to SEQ ID NO: 389
  Synthetic Oligonucleotide

SEQ ID NO: 1069 - RNA, 31 nt, Artificial Sequence; identical to SEQ ID NO: 538
  Synthetic Oligonucleotide

SEQ ID NO: 1070 - RNA, 31 nt, Artificial Sequence; identical to SEQ ID NO: 539
  Synthetic Oligonucleotide

SEQ ID NO: 1071 - RNA, 31 nt, Artificial Sequence; identical to SEQ ID NO: 540
  Synthetic Oligonucleotide

SEQ ID NO: 1072 - RNA, 31 nt, Artificial Sequence; identical to SEQ ID NO: 541
  Synthetic Oligonucleotide

SEQ ID NO: 1073 - RNA, 31 nt, Artificial Sequence; identical to SEQ ID NO: 542
  Synthetic Oligonucleotide

SEQ ID NO: 1074 - RNA, 31 nt, Artificial Sequence; identical to SEQ ID NO: 543
  Synthetic Oligonucleotide

SEQ ID NO: 1075 - RNA, 31 nt, Artificial Sequence; identical to SEQ ID NO: 544
  Synthetic Oligonucleotide

SEQ ID NO: 1076 - RNA, 31 nt, Artificial Sequence; identical to SEQ ID NO: 545
  Synthetic Oligonucleotide

SEQ ID NO: 1077 - RNA, 31 nt, Artificial Sequence; identical to SEQ ID NO: 546
  Synthetic Oligonucleotide

SEQ ID NO: 1078 - RNA, 31 nt, Artificial Sequence; identical to SEQ ID NO: 547
  Synthetic Oligonucleotide

SEQ ID NO: 1079 - RNA, 31 nt, Artificial Sequence; identical to SEQ ID NO: 548
  Synthetic Oligonucleotide

SEQ ID NO: 1080 - RNA, 31 nt, Artificial Sequence; identical to SEQ ID NO: 392
  Synthetic Oligonucleotide

SEQ ID NO: 1081 - RNA, 31 nt, Artificial Sequence; identical to SEQ ID NO: 550
  Synthetic Oligonucleotide

SEQ ID NO: 1082 - RNA, 31 nt, Artificial Sequence; identical to SEQ ID NO: 551
  Synthetic Oligonucleotide

SEQ ID NO: 1083 - RNA, 31 nt, Artificial Sequence; identical to SEQ ID NO: 552
  Synthetic Oligonucleotide

SEQ ID NO: 1084 - RNA, 31 nt, Artificial Sequence; identical to SEQ ID NO: 553
  Synthetic Oligonucleotide

SEQ ID NO: 1085 - RNA, 31 nt, Artificial Sequence; identical to SEQ ID NO: 554
  Synthetic Oligonucleotide

SEQ ID NO: 1086 - RNA, 31 nt, Artificial Sequence; identical to SEQ ID NO: 555
  Synthetic Oligonucleotide

SEQ ID NO: 1087 - RNA, 31 nt, Artificial Sequence; identical to SEQ ID NO: 556
  Synthetic Oligonucleotide

SEQ ID NO: 1088 - RNA, 31 nt, Artificial Sequence; identical to SEQ ID NO: 557
  Synthetic Oligonucleotide

SEQ ID NO: 1089 - RNA, 31 nt, Artificial Sequence; identical to SEQ ID NO: 558
  Synthetic Oligonucleotide

SEQ ID NO: 1090 - RNA, 31 nt, Artificial Sequence; identical to SEQ ID NO: 394
  Synthetic Oligonucleotide

SEQ ID NO: 1091 - RNA, 31 nt, Artificial Sequence; identical to SEQ ID NO: 560
  Synthetic Oligonucleotide

SEQ ID NO: 1092 - RNA, 31 nt, Artificial Sequence; identical to SEQ ID NO: 561
  Synthetic Oligonucleotide

SEQ ID NO: 1093 - RNA, 31 nt, Artificial Sequence; identical to SEQ ID NO: 562
  Synthetic Oligonucleotide

SEQ ID NO: 1094 - RNA, 31 nt, Artificial Sequence; identical to SEQ ID NO: 563
  Synthetic Oligonucleotide

SEQ ID NO: 1095 - RNA, 31 nt, Artificial Sequence; identical to SEQ ID NO: 564
  Synthetic Oligonucleotide

SEQ ID NO: 1096 - RNA, 31 nt, Artificial Sequence; identical to SEQ ID NO: 565
  Synthetic Oligonucleotide

SEQ ID NO: 1097 - RNA, 31 nt, Artificial Sequence; identical to SEQ ID NO: 566
  Synthetic Oligonucleotide

SEQ ID NO: 1098 - RNA, 31 nt, Artificial Sequence; identical to SEQ ID NO: 567
  Synthetic Oligonucleotide

SEQ ID NO: 1099 - RNA, 31 nt, Artificial Sequence; identical to SEQ ID NO: 568
  Synthetic Oligonucleotide

SEQ ID NO: 1100 - RNA, 31 nt, Artificial Sequence; identical to SEQ ID NO: 569
  Synthetic Oligonucleotide

SEQ ID NO: 1101 - RNA, 31 nt, Artificial Sequence; identical to SEQ ID NO: 570
  Synthetic Oligonucleotide

SEQ ID NO: 1102 - RNA, 31 nt, Artificial Sequence; identical to SEQ ID NO: 571
  Synthetic Oligonucleotide

SEQ ID NO: 1103 - RNA, 31 nt, Artificial Sequence; identical to SEQ ID NO: 572
  Synthetic Oligonucleotide

SEQ ID NO: 1104 - RNA, 62 nt, Artificial Sequence
  Synthetic Oligonucleotide
gcggugaaccucuuggguugcuuccucuugagcggugaaccucuuggguugcuuccucuuga

SEQ ID NO: 1105 - RNA, 31 nt, Artificial Sequence; identical to SEQ ID NO: 574
  Synthetic Oligonucleotide

SEQ ID NO: 1106 - RNA, 31 nt, Artificial Sequence; identical to SEQ ID NO: 575
  Synthetic Oligonucleotide

SEQ ID NO: 1107 - RNA, 31 nt, Artificial Sequence; identical to SEQ ID NO: 576
  Synthetic Oligonucleotide

SEQ ID NO: 1108 - RNA, 31 nt, Artificial Sequence; identical to SEQ ID NO: 577
  Synthetic Oligonucleotide

SEQ ID NO: 1109 - RNA, 31 nt, Artificial Sequence; identical to SEQ ID NO: 578
  Synthetic Oligonucleotide

SEQ ID NO: 1110 - RNA, 31 nt, Artificial Sequence; identical to SEQ ID NO: 579
  Synthetic Oligonucleotide

SEQ ID NO: 1111 - RNA, 31 nt, Artificial Sequence; identical to SEQ ID NO: 580
  Synthetic Oligonucleotide

SEQ ID NO: 1112 - RNA, 31 nt, Artificial Sequence; identical to SEQ ID NO: 581
  Synthetic Oligonucleotide

SEQ ID NO: 1113 - RNA, 31 nt, Artificial Sequence; identical to SEQ ID NO: 582
  Synthetic Oligonucleotide

SEQ ID NO: 1114 - RNA, 31 nt, Artificial Sequence; identical to SEQ ID NO: 583
  Synthetic Oligonucleotide

SEQ ID NO: 1115 - RNA, 31 nt, Artificial Sequence; identical to SEQ ID NO: 584
  Synthetic Oligonucleotide

SEQ ID NO: 1116 - RNA, 31 nt, Artificial Sequence; identical to SEQ ID NO: 585
  Synthetic Oligonucleotide

SEQ ID NO: 1117 - RNA, 31 nt, Artificial Sequence; identical to SEQ ID NO: 586
  Synthetic Oligonucleotide

SEQ ID NO: 1118 - RNA, 31 nt, Artificial Sequence; identical to SEQ ID NO: 587
  Synthetic Oligonucleotide

SEQ ID NO: 1119 - RNA, 31 nt, Artificial Sequence; identical to SEQ ID NO: 588
  Synthetic Oligonucleotide

SEQ ID NO: 1120 - RNA, 31 nt, Artificial Sequence; identical to SEQ ID NO: 395
  Synthetic Oligonucleotide

SEQ ID NO: 1121 - RNA, 31 nt, Artificial Sequence; identical to SEQ ID NO: 590
  Synthetic Oligonucleotide

SEQ ID NO: 1122 - RNA, 31 nt, Artificial Sequence; identical to SEQ ID NO: 591
  Synthetic Oligonucleotide

SEQ ID NO: 1123 - RNA, 31 nt, Artificial Sequence; identical to SEQ ID NO: 592
  Synthetic Oligonucleotide

SEQ ID NO: 1124 - RNA, 31 nt, Artificial Sequence; identical to SEQ ID NO: 593
  Synthetic Oligonucleotide

SEQ ID NO: 1125 - RNA, 31 nt, Artificial Sequence; identical to SEQ ID NO: 396
  Synthetic Oligonucleotide

SEQ ID NO: 1126 - RNA, 31 nt, Artificial Sequence; identical to SEQ ID NO: 595
  Synthetic Oligonucleotide

SEQ ID NO: 1127 - RNA, 31 nt, Artificial Sequence; identical to SEQ ID NO: 596
  Synthetic Oligonucleotide

SEQ ID NO: 1128 - RNA, 31 nt, Artificial Sequence; identical to SEQ ID NO: 397
  Synthetic Oligonucleotide

SEQ ID NO: 1129 - RNA, 31 nt, Artificial Sequence; identical to SEQ ID NO: 598
  Synthetic Oligonucleotide

SEQ ID NO: 1130 - RNA, 31 nt, Artificial Sequence; identical to SEQ ID NO: 599
  Synthetic Oligonucleotide

SEQ ID NO: 1131 - RNA, 31 nt, Artificial Sequence; identical to SEQ ID NO: 600
  Synthetic Oligonucleotide

SEQ ID NO: 1132 - RNA, 31 nt, Artificial Sequence; identical to SEQ ID NO: 601
  Synthetic Oligonucleotide

SEQ ID NO: 1133 - RNA, 31 nt, Artificial Sequence; identical to SEQ ID NO: 398
  Synthetic Oligonucleotide

SEQ ID NO: 1134 - RNA, 31 nt, Artificial Sequence; identical to SEQ ID NO: 603
  Synthetic Oligonucleotide

SEQ ID NO: 1135 - RNA, 31 nt, Artificial Sequence; identical to SEQ ID NO: 604
  Synthetic Oligonucleotide

SEQ ID NO: 1136 - RNA, 31 nt, Artificial Sequence; identical to SEQ ID NO: 400
  Synthetic Oligonucleotide

SEQ ID NO: 1137 - RNA, 31 nt, Artificial Sequence
  Synthetic Oligonucleotide
gugcggggguacaucggcaggucaaugguau

SEQ ID NO: 1138 - RNA, 31 nt, Artificial Sequence
  Synthetic Oligonucleotide
gugcggggggacaucggcaggucaaugguau

SEQ ID NO: 1139 - RNA, 31 nt, Artificial Sequence
  Synthetic Oligonucleotide
gugcgggggaacaucggcaggucaaugguau

SEQ ID NO: 1140 - RNA, 31 nt, Artificial Sequence; identical to SEQ ID NO: 402
  Synthetic Oligonucleotide

SEQ ID NO: 1141 - RNA, 31 nt, Artificial Sequence
  Synthetic Oligonucleotide
gccucaggauacauggggagcagguugucug

SEQ ID NO: 1142 - RNA, 31 nt, Artificial Sequence
  Synthetic Oligonucleotide
gccucaggagacauggggagcagguugucug

SEQ ID NO: 1143 - RNA, 31 nt, Artificial Sequence
  Synthetic Oligonucleotide
gccucaggaaacauggggagcagguugucug

SEQ ID NO: 1144 - RNA, 51 nt, Artificial Sequence; identical to SEQ ID NO: 401
  Synthetic Oligonucleotide

SEQ ID NO: 1145 - RNA, 51 nt, Artificial Sequence
  Synthetic Oligonucleotide
gcaacucagucuugauauauccaguuccuuuagggccaucaaguuccauug

SEQ ID NO: 1146 - RNA, 51 nt, Artificial Sequence
  Synthetic Oligonucleotide
gcaacucagucuugauagauccaguuccuuuagggccaucaaguuccauug

SEQ ID NO: 1147 - RNA, 51 nt, Artificial Sequence; identical to SEQ ID NO: 399
  Synthetic Oligonucleotide

SEQ ID NO: 1148 - RNA, 30 nt, Artificial Sequence
  Synthetic Oligonucleotide
gggggacaucggcaggucaaugguauugcu

SEQ ID NO: 1149 - RNA, 30 nt, Artificial Sequence
  Synthetic Oligonucleotide
cggggggacaucggcaggucaaugguauug

SEQ ID NO: 1150 - RNA, 30 nt, Artificial Sequence
  Synthetic Oligonucleotide
agugcggggggacaucggcaggucaauggu

SEQ ID NO: 1151 - RNA, 30 nt, Artificial Sequence
  Synthetic Oligonucleotide
aggagacauggggagcagguugucuguggu

SEQ ID NO: 1152 - RNA, 30 nt, Artificial Sequence
  Synthetic Oligonucleotide
ucaggagacauggggagcagguugucugug

SEQ ID NO: 1153 - RNA, 30 nt, Artificial Sequence
  Synthetic Oligonucleotide
cuccucaggagacauggggagcagguuguc

SEQ ID NO: 1154 - RNA, 31 nt, Artificial Sequence; identical to SEQ ID NO: 605
  Synthetic Oligonucleotide

SEQ ID NO: 1155 - RNA, 31 nt, Artificial Sequence; identical to SEQ ID NO: 606
  Synthetic Oligonucleotide

SEQ ID NO: 1156 - RNA, 31 nt, Artificial Sequence; identical to SEQ ID NO: 607
  Synthetic Oligonucleotide

SEQ ID NO: 1157 - RNA, 31 nt, Artificial Sequence; identical to SEQ ID NO: 608
  Synthetic Oligonucleotide

SEQ ID NO: 1158 - RNA, 31 nt, Artificial Sequence; identical to SEQ ID NO: 609
  Synthetic Oligonucleotide

SEQ ID NO: 1159 - RNA, 31 nt, Artificial Sequence; identical to SEQ ID NO: 610
  Synthetic Oligonucleotide

SEQ ID NO: 1160 - RNA, 31 nt, Artificial Sequence; identical to SEQ ID NO: 611
  Synthetic Oligonucleotide

SEQ ID NO: 1161 - RNA, 31 nt, Artificial Sequence; identical to SEQ ID NO: 612
  Synthetic Oligonucleotide

SEQ ID NO: 1162 - RNA, 31 nt, Artificial Sequence; identical to SEQ ID NO: 613
  Synthetic Oligonucleotide

SEQ ID NO: 1163 - RNA, 31 nt, Artificial Sequence; identical to SEQ ID NO: 614
  Synthetic Oligonucleotide

SEQ ID NO: 1164 - RNA, 31 nt, Artificial Sequence; identical to SEQ ID NO: 615
  Synthetic Oligonucleotide

SEQ ID NO: 1165 - RNA, 31 nt, Artificial Sequence; identical to SEQ ID NO: 616
  Synthetic Oligonucleotide

SEQ ID NO: 1166 - RNA, 31 nt, Artificial Sequence; identical to SEQ ID NO: 617
  Synthetic Oligonucleotide

SEQ ID NO: 1167 - RNA, 31 nt, Artificial Sequence; identical to SEQ ID NO: 618
  Synthetic Oligonucleotide

SEQ ID NO: 1168 - RNA, 31 nt, Artificial Sequence; identical to SEQ ID NO: 619
  Synthetic Oligonucleotide

SEQ ID NO: 1169 - RNA, 31 nt, Artificial Sequence; identical to SEQ ID NO: 620
  Synthetic Oligonucleotide

SEQ ID NO: 1170 - RNA, 31 nt, Artificial Sequence; identical to SEQ ID NO: 621
  Synthetic Oligonucleotide

SEQ ID NO: 1171 - RNA, 31 nt, Artificial Sequence; identical to SEQ ID NO: 622
  Synthetic Oligonucleotide

SEQ ID NO: 1172 - RNA, 31 nt, Artificial Sequence; identical to SEQ ID NO: 623
  Synthetic Oligonucleotide

SEQ ID NO: 1173 - RNA, 31 nt, Artificial Sequence; identical to SEQ ID NO: 623
  Synthetic Oligonucleotide

SEQ ID NO: 1174 - RNA, 31 nt, Artificial Sequence; identical to SEQ ID NO: 625
  Synthetic Oligonucleotide

SEQ ID NO: 1175 - RNA, 31 nt, Artificial Sequence; identical to SEQ ID NO: 626
  Synthetic Oligonucleotide

SEQ ID NO: 1176 - RNA, 31 nt, Artificial Sequence; identical to SEQ ID NO: 627
  Synthetic Oligonucleotide

SEQ ID NO: 1177 - RNA, 31 nt, Artificial Sequence; identical to SEQ ID NO: 605
  Synthetic Oligonucleotide

SEQ ID NO: 1178 - RNA, 31 nt, Artificial Sequence; identical to SEQ ID NO: 629
  Synthetic Oligonucleotide

SEQ ID NO: 1179 - RNA, 31 nt, Artificial Sequence; identical to SEQ ID NO: 630
  Synthetic Oligonucleotide

SEQ ID NO: 1180 - RNA, 31 nt, Artificial Sequence; identical to SEQ ID NO: 631
  Synthetic Oligonucleotide

SEQ ID NO: 1181 - RNA, 31 nt, Artificial Sequence; identical to SEQ ID NO: 606
  Synthetic Oligonucleotide

SEQ ID NO: 1182 - RNA, 31 nt, Artificial Sequence; identical to SEQ ID NO: 633
  Synthetic Oligonucleotide

SEQ ID NO: 1183 - RNA, 31 nt, Artificial Sequence; identical to SEQ ID NO: 634
  Synthetic Oligonucleotide

SEQ ID NO: 1184 - RNA, 31 nt, Artificial Sequence; identical to SEQ ID NO: 607
  Synthetic Oligonucleotide

SEQ ID NO: 1185 - RNA, 31 nt, Artificial Sequence; identical to SEQ ID NO: 608
  Synthetic Oligonucleotide

SEQ ID NO: 1186 - RNA, 31 nt, Artificial Sequence; identical to SEQ ID NO: 637
  Synthetic Oligonucleotide

SEQ ID NO: 1187 - RNA, 31 nt, Artificial Sequence; identical to SEQ ID NO: 638
  Synthetic Oligonucleotide

SEQ ID NO: 1188 - RNA, 31 nt, Artificial Sequence; identical to SEQ ID NO: 639
  Synthetic Oligonucleotide

SEQ ID NO: 1189 - RNA, 31 nt, Artificial Sequence; identical to SEQ ID NO: 609
  Synthetic Oligonucleotide

SEQ ID NO: 1190 - RNA, 31 nt, Artificial Sequence; identical to SEQ ID NO: 641
  Synthetic Oligonucleotide

SEQ ID NO: 1191 - RNA, 31 nt, Artificial Sequence; identical to SEQ ID NO: 642
  Synthetic Oligonucleotide

SEQ ID NO: 1192 - RNA, 31 nt, Artificial Sequence; identical to SEQ ID NO: 610
  Synthetic Oligonucleotide

SEQ ID NO: 1193 - RNA, 31 nt, Artificial Sequence; identical to SEQ ID NO: 644
  Synthetic Oligonucleotide

SEQ ID NO: 1194 - RNA, 31 nt, Artificial Sequence; identical to SEQ ID NO: 645
  Synthetic Oligonucleotide

SEQ ID NO: 1195 - RNA, 31 nt, Artificial Sequence; identical to SEQ ID NO: 611
  Synthetic Oligonucleotide

SEQ ID NO: 1196 - RNA, 31 nt, Artificial Sequence; identical to SEQ ID NO: 647
  Synthetic Oligonucleotide

SEQ ID NO: 1197 - RNA, 31 nt, Artificial Sequence; identical to SEQ ID NO: 648
  Synthetic Oligonucleotide

SEQ ID NO: 1198 - RNA, 31 nt, Artificial Sequence; identical to SEQ ID NO: 649
  Synthetic Oligonucleotide

SEQ ID NO: 1199 - RNA, 31 nt, Artificial Sequence; identical to SEQ ID NO: 612
  Synthetic Oligonucleotide

SEQ ID NO: 1200 - RNA, 31 nt, Artificial Sequence; identical to SEQ ID NO: 651
  Synthetic Oligonucleotide

SEQ ID NO: 1201 - RNA, 31 nt, Artificial Sequence; identical to SEQ ID NO: 652
  Synthetic Oligonucleotide

SEQ ID NO: 1202 - RNA, 31 nt, Artificial Sequence; identical to SEQ ID NO: 613
  Synthetic Oligonucleotide

SEQ ID NO: 1203 - RNA, 31 nt, Artificial Sequence; identical to SEQ ID NO: 654
  Synthetic Oligonucleotide

SEQ ID NO: 1204 - RNA, 31 nt, Artificial Sequence; identical to SEQ ID NO: 614
  Synthetic Oligonucleotide

SEQ ID NO: 1205 - RNA, 31 nt, Artificial Sequence; identical to SEQ ID NO: 656
  Synthetic Oligonucleotide

SEQ ID NO: 1206 - RNA, 31 nt, Artificial Sequence; identical to SEQ ID NO: 657
  Synthetic Oligonucleotide

SEQ ID NO: 1207 - RNA, 31 nt, Artificial Sequence; identical to SEQ ID NO: 658
  Synthetic Oligonucleotide

SEQ ID NO: 1208 - RNA, 31 nt, Artificial Sequence; identical to SEQ ID NO: 615
  Synthetic Oligonucleotide

SEQ ID NO: 1209 - RNA, 31 nt, Artificial Sequence; identical to SEQ ID NO: 660
  Synthetic Oligonucleotide

SEQ ID NO: 1210 - RNA, 31 nt, Artificial Sequence; identical to SEQ ID NO: 661
  Synthetic Oligonucleotide

SEQ ID NO: 1211 - RNA, 31 nt, Artificial Sequence; identical to SEQ ID NO: 616
  Synthetic Oligonucleotide

SEQ ID NO: 1212 - RNA, 31 nt, Artificial Sequence; identical to SEQ ID NO: 663
  Synthetic Oligonucleotide

SEQ ID NO: 1213 - RNA, 31 nt, Artificial Sequence; identical to SEQ ID NO: 664
  Synthetic Oligonucleotide

SEQ ID NO: 1214 - RNA, 31 nt, Artificial Sequence; identical to SEQ ID NO: 617
  Synthetic Oligonucleotide

SEQ ID NO: 1215 - RNA, 31 nt, Artificial Sequence; identical to SEQ ID NO: 666
  Synthetic Oligonucleotide

SEQ ID NO: 1216 - RNA, 31 nt, Artificial Sequence; identical to SEQ ID NO: 667
  Synthetic Oligonucleotide

SEQ ID NO: 1217 - RNA, 31 nt, Artificial Sequence; identical to SEQ ID NO: 618
  Synthetic Oligonucleotide

SEQ ID NO: 1218 - RNA, 31 nt, Artificial Sequence; identical to SEQ ID NO: 619
  Synthetic Oligonucleotide

SEQ ID NO: 1219 - RNA, 31 nt, Artificial Sequence; identical to SEQ ID NO: 670
  Synthetic Oligonucleotide

SEQ ID NO: 1220 - RNA, 31 nt, Artificial Sequence; identical to SEQ ID NO: 671
  Synthetic Oligonucleotide

SEQ ID NO: 1221 - RNA, 31 nt, Artificial Sequence; identical to SEQ ID NO: 672
  Synthetic Oligonucleotide

SEQ ID NO: 1222 - RNA, 31 nt, Artificial Sequence; identical to SEQ ID NO: 673
  Synthetic Oligonucleotide

SEQ ID NO: 1223 - RNA, 31 nt, Artificial Sequence; identical to SEQ ID NO: 620
  Synthetic Oligonucleotide

SEQ ID NO: 1224 - RNA, 31 nt, Artificial Sequence; identical to SEQ ID NO: 675
  Synthetic Oligonucleotide

SEQ ID NO: 1225 - RNA, 31 nt, Artificial Sequence; identical to SEQ ID NO: 676
  Synthetic Oligonucleotide

SEQ ID NO: 1226 - RNA, 31 nt, Artificial Sequence; identical to SEQ ID NO: 621
  Synthetic Oligonucleotide

SEQ ID NO: 1227 - RNA, 31 nt, Artificial Sequence; identical to SEQ ID NO: 678
  Synthetic Oligonucleotide

SEQ ID NO: 1228 - RNA, 31 nt, Artificial Sequence; identical to SEQ ID NO: 679
  Synthetic Oligonucleotide

SEQ ID NO: 1229 - RNA, 31 nt, Artificial Sequence; identical to SEQ ID NO: 622
  Synthetic Oligonucleotide

SEQ ID NO: 1230 - RNA, 31 nt, Artificial Sequence; identical to SEQ ID NO: 681
  Synthetic Oligonucleotide

SEQ ID NO: 1231 - RNA, 31 nt, Artificial Sequence; identical to SEQ ID NO: 682
  Synthetic Oligonucleotide

SEQ ID NO: 1232 - RNA, 31 nt, Artificial Sequence; identical to SEQ ID NO: 623
  Synthetic Oligonucleotide

SEQ ID NO: 1233 - RNA, 31 nt, Artificial Sequence; identical to SEQ ID NO: 684
  Synthetic Oligonucleotide

SEQ ID NO: 1234 - RNA, 31 nt, Artificial Sequence; identical to SEQ ID NO: 685
  Synthetic Oligonucleotide

SEQ ID NO: 1235 - RNA, 31 nt, Artificial Sequence; identical to SEQ ID NO: 686
  Synthetic Oligonucleotide

SEQ ID NO: 1236 - RNA, 31 nt, Artificial Sequence; identical to SEQ ID NO: 687
  Synthetic Oligonucleotide

SEQ ID NO: 1237 - RNA, 31 nt, Artificial Sequence; identical to SEQ ID NO: 625
  Synthetic Oligonucleotide

SEQ ID NO: 1238 - RNA, 31 nt, Artificial Sequence; identical to SEQ ID NO: 689
  Synthetic Oligonucleotide

SEQ ID NO: 1239 - RNA, 31 nt, Artificial Sequence; identical to SEQ ID NO: 626
  Synthetic Oligonucleotide

SEQ ID NO: 1240 - RNA, 31 nt, Artificial Sequence; identical to SEQ ID NO: 691
  Synthetic Oligonucleotide

SEQ ID NO: 1241 - RNA, 31 nt, Artificial Sequence; identical to SEQ ID NO: 692
  Synthetic Oligonucleotide

SEQ ID NO: 1242 - RNA, 31 nt, Artificial Sequence; identical to SEQ ID NO: 693
  Synthetic Oligonucleotide

SEQ ID NO: 1243 - RNA, 31 nt, Artificial Sequence; identical to SEQ ID NO: 694
  Synthetic Oligonucleotide

SEQ ID NO: 1244 - RNA, 31 nt, Artificial Sequence; identical to SEQ ID NO: 695
  Synthetic Oligonucleotide

SEQ ID NO: 1245 - RNA, 31 nt, Artificial Sequence; identical to SEQ ID NO: 696
  Synthetic Oligonucleotide

SEQ ID NO: 1246 - RNA, 31 nt, Artificial Sequence; identical to SEQ ID NO: 697
  Synthetic Oligonucleotide

SEQ ID NO: 1247 - RNA, 31 nt, Artificial Sequence; identical to SEQ ID NO: 698
  Synthetic Oligonucleotide

SEQ ID NO: 1248 - RNA, 31 nt, Artificial Sequence; identical to SEQ ID NO: 699
  Synthetic Oligonucleotide

SEQ ID NO: 1249 - RNA, 31 nt, Artificial Sequence; identical to SEQ ID NO: 700
  Synthetic Oligonucleotide

SEQ ID NO: 1250 - RNA, 31 nt, Artificial Sequence
  Synthetic Oligonucleotide
gucacguccuccauguccgcgcccagccggg

SEQ ID NO: 1251 - RNA, 31 nt, Artificial Sequence
  Synthetic Oligonucleotide
ggcucacguccuccauguccgcgcccagccg

SEQ ID NO: 1252 - RNA, 31 nt, Artificial Sequence
  Synthetic Oligonucleotide
gccgcucacguccuccauguccgcgcccagc

SEQ ID NO: 1253 - RNA, 31 nt, Artificial Sequence
  Synthetic Oligonucleotide
gggccgcucacguccuccauguccgcgccca

SEQ ID NO: 1254 - RNA, 31 nt, Artificial Sequence
  Synthetic Oligonucleotide
ggcggccgcucacguccuccauguccgcgcc

SEQ ID NO: 1255 - RNA, 31 nt, Artificial Sequence
  Synthetic Oligonucleotide
gaggcggccgcucacguccuccauguccgcg

SEQ ID NO: 1256 - RNA, 31 nt, Artificial Sequence
  Synthetic Oligonucleotide
gccaggcggccgcucacguccuccauguccg

SEQ ID NO: 1257 - RNA, 31 nt, Artificial Sequence
  Synthetic Oligonucleotide
gcaccaggcggccgcucacguccuccauguc

SEQ ID NO: 1258 - RNA, 31 nt, Artificial Sequence; identical to SEQ ID NO: 701
  Synthetic Oligonucleotide

SEQ ID NO: 1259 - RNA, 31 nt, Artificial Sequence; identical to SEQ ID NO: 702
  Synthetic Oligonucleotide

SEQ ID NO: 1260 - RNA, 31 nt, Artificial Sequence; identical to SEQ ID NO: 703
  Synthetic Oligonucleotide

SEQ ID NO: 1261 - RNA, 31 nt, Artificial Sequence; identical to SEQ ID NO: 704
  Synthetic Oligonucleotide

SEQ ID NO: 1262 - RNA, 31 nt, Artificial Sequence; identical to SEQ ID NO: 705
  Synthetic Oligonucleotide

SEQ ID NO: 1263 - RNA, 31 nt, Artificial Sequence; identical to SEQ ID NO: 706
  Synthetic Oligonucleotide

SEQ ID NO: 1264 - RNA, 31 nt, Artificial Sequence; identical to SEQ ID NO: 707
  Synthetic Oligonucleotide

SEQ ID NO: 1265 - RNA, 31 nt, Artificial Sequence; identical to SEQ ID NO: 708
  Synthetic Oligonucleotide

SEQ ID NO: 1266 - RNA, 31 nt, Artificial Sequence
  Synthetic Oligonucleotide
gucuucugcaggucaucggcaucgcggagga

SEQ ID NO: 1267 - RNA, 31 nt, Artificial Sequence
  Synthetic Oligonucleotide
ggcucuucugcaggucaucggcaucgcggag

SEQ ID NO: 1268 - RNA, 31 nt, Artificial Sequence
  Synthetic Oligonucleotide
gaggcucuucugcaggucaucggcaucgcgg

SEQ ID NO: 1269 - RNA, 31 nt, Artificial Sequence
  Synthetic Oligonucleotide
gccaggcucuucugcaggucaucggcaucgc

SEQ ID NO: 1270 - RNA, 31 nt, Artificial Sequence
  Synthetic Oligonucleotide
gugccaggcucuucugcaggucaucggcauc

SEQ ID NO: 1271 - RNA, 31 nt, Artificial Sequence
  Synthetic Oligonucleotide
gacugccaggcucuucugcaggucaucggca

SEQ ID NO: 1272 - RNA, 31 nt, Artificial Sequence
  Synthetic Oligonucleotide
gacacugccaggcucuucugcaggucaucgg

SEQ ID NO: 1273 - RNA, 31 nt, Artificial Sequence
  Synthetic Oligonucleotide
gguacacugccaggcucuucugcaggucauc

SEQ ID NO: 1274 - RNA, 50 nt, Artificial Sequence; identical to SEQ ID NO: 711
  Synthetic Oligonucleotide

SEQ ID NO: 1275 - RNA, 50 nt, Artificial Sequence; identical to SEQ ID NO: 709
  Synthetic Oligonucleotide

SEQ ID NO: 1276 - RNA, 31 nt, Artificial Sequence; identical to SEQ ID NO: 710
  Synthetic Oligonucleotide

SEQ ID NO: 1277 - RNA, 30 nt, Artificial Sequence
  Synthetic Oligonucleotide
aauguaaucgcaaucugaaucuugguuuca

SEQ ID NO: 1278 - RNA, 30 nt, Artificial Sequence
  Synthetic Oligonucleotide
uuaauguaaucgcaaucugaaucuugguuu

SEQ ID NO: 1279 - RNA, 30 nt, Artificial Sequence
  Synthetic Oligonucleotide
cuuuaauguaaucgcaaucugaaucuuggu

SEQ ID NO: 1280 - RNA, 30 nt, Artificial Sequence
  Synthetic Oligonucleotide
cccuuuaauguaaucgcaaucugaaucuug

What is claimed is:

1. An engineered adenosine deaminase comprising one or more mutations, wherein the engineered adenosine deaminase has cytidine deaminase activity, wherein said adenosine deaminase protein or catalytic domain thereof comprises one or more of the mutations: E488Q, V351G, S486A, T375S, S370C, P462A, N597I, L332I, I398V, K350I, M383L, D619G, S582T, V440I, S495N, K418E, S661T based on amino acid sequence positions of hADAR2-D, and corresponding mutations in a homologous ADAR protein.

2. An engineered adenosine deaminase comprising one or more mutations, wherein the engineered adenosine deaminase has cytidine deaminase activity.

3. The engineered adenosine deaminase of claim 2, wherein the engineered adenosine deaminase has adenosine deaminase activity.

4. The engineered adenosine deaminase of claim 2, wherein the engineered adenosine deaminase is a portion of a fusion protein.

5. The engineered adenosine deaminase of claim 2, wherein the fusion protein comprises a functional domain.

6. The engineered adenosine deaminase of claim 2, wherein the functional domain is capable of directing the engineered adenosine deaminase to bind to a target nucleic acid.

7. The engineered adenosine deaminase of claim 2, wherein the functional domain is a CRISPR-Cas protein of any one of claims 50 to 55.

8. The engineered adenosine deaminase of claim 2, wherein the CRISPR-Cas protein is a dead form CRISPR-Cas protein or CRISPR-Cas nickase protein.

9. The engineered adenosine deaminase of claim 2, wherein the one or more mutations comprises: E488Q, V351G, S486A, T375S, S370C, P462A, N597I, L332I, I398V, K350I, M383L, D619G, S582T, V440I, S495N, K418E, S661T based on amino acid sequence positions of hADAR2-D, and corresponding mutations in a homologous ADAR protein.

10. The engineered adenosine deaminase of claim 2, wherein the one or more mutations comprises: E488Q, V351G, S486A, T375S, S370C, P462A, N597I, L332I, I398V, K350I, M383L, D619G, S582T, V440I, S495N, K418E, and S661T based on amino acid sequence positions of hADAR2-D, and corresponding mutations in a homologous ADAR protein.

11. A polynucleotide encoding the engineered adenosine deaminase of any one of claims above claims, or a catalytic domain thereof.

12. A vector comprising the polynucleotide of claim 11.

13. A pharmaceutical composition comprising the engineered adenosine deaminase of any one of claims 1-10 or a catalytic domain thereof formulated for delivery by liposomes, nanoparticles, exosomes, microvesicles, nucleic acid nanoassemblies, a gene gun, or an implantable device.

14. An engineered cell expressing the engineered adenosine deaminase of any one of claims 1-10 or a catalytic domain thereof.

15. The engineered cell of claim 14, wherein the cell transiently expresses the engineered adenosine deaminase or the catalytic domain thereof.

16. The engineered cell of claim 15, wherein the cell non-transiently expresses the engineered adenosine deaminase or the catalytic domain thereof.

17. An engineered, non-naturally occurring system for modifying nucleotides in a target nucleic acid, comprising
a) a dead CRISPR-Cas or CRISPR-Cas nickase protein, or a nucleotide sequence encoding said dead Cas or Cas nickase protein;
b) a guide molecule comprising a guide sequence that hybridizes to a target sequence and designed to form a complex with the dead CRISPR-Cas or CRISPR-Cas nickase protein; and
c) a nucleotide deaminase protein or catalytic domain thereof, or a nucleotide sequence encoding said nucleotide deaminase protein or catalytic domain thereof, wherein said nucleotide deaminase protein or catalytic domain thereof is covalently or non-covalently linked to said dead CRISPR-Cas or CRISPR-Cas nickase protein or said guide molecule is adapted to link thereof after delivery.

18. The system of claim 17, wherein said adenosine deaminase protein or catalytic domain thereof comprises one or more of the mutations: E488Q, V351G, S486A, T375S, S370C, P462A, N597I, L332I, I398V, K350I, M383L, D619G, S582T, V440I, S495N, K418E, S661T based on amino acid sequence positions of hADAR2-D, and corresponding mutations in a homologous ADAR protein.

19. The system of claim 17, wherein said adenosine deaminase protein or catalytic domain thereof comprises mutations: E488Q, V351G, S486A, T375S, S370C, P462A, N597I, L332I, I398V, K350I, M383L, D619G, S582T, V440I, S495N, K418E, and S661T based on amino acid sequence positions of hADAR2-D, and corresponding mutations in a homologous ADAR protein.

20. The system of claim 17, wherein the CRISPR-Cas protein is Cas9, Cas12, Cas13, Cas 14, CasX, or CasY.

21. The system of claim 17, wherein the CRISPR-Cas protein is Cas13b.

22. The system of claim 17, wherein the CRISPR-Cas protein is Cas13b-t1, Cas13b-t2, or Cas13b-t3.

23. The system of claim 17, wherein the CRISPR-Cas is an engineered CRISPR-Cas protein of any one of claims 50 to 367.

24. A method for modifying nucleotide in a target nucleic acid, comprising:
delivering to said target nucleic acid the engineered adenosine deaminase of any one of claims 1-10, or the system of any one of claims 17-23, wherein the deaminase deaminates a nucleotide at one or more target loci on the target nucleic acid.

25. The method of claim 24, wherein said nucleotide deaminase protein or catalytic domain thereof has been modified to increase activity against a DNA-RNA heteroduplex.

26. The method of claim 24, wherein said nucleotide deaminase protein or catalytic domain thereof has been modified to reduce off-target effects.

27. The method of claim 24, wherein the target nucleic acid is within a cell.

28. The method of claim 24, wherein said cell is a eukaryotic cell.

29. The method of claim 24, wherein said cell is a non-human animal cell.

30. The method of claim 24, wherein said cell is a human cell.

31. The method of claim 24, wherein said cell is a plant cell.

32. The method of claim 24, wherein said target nucleic acid is within an animal.

33. The method of claim 24, wherein said target nucleic acid is within a plant.

34. The method of claim 24, wherein said target nucleic acid is comprised in a DNA molecule in vitro.

35. The method of claim 24, wherein the engineered adenosine deaminase, or one or more components of the system are delivered to the cell as a ribonucleoprotein complex.

36. The method of claim 24, wherein the engineered adenosine deaminase, or one or more components of the system are delivered via one or more particles, one or more vesicles, or one or more viral vectors.

37. The method of claim 24, wherein said one or more particles comprise a lipid, a sugar, a metal or a protein.

38. The method of claim 24, wherein said one or more particles comprise lipid nanoparticles.

39. The method of claim 24, wherein said one or more vesicles comprise exosomes or liposomes.

40. The method of claim 24, wherein said one or more viral vectors comprise one or more adenoviral vectors, one or more lentiviral vectors, or one or more adeno-associated viral vectors.

41. The method of claim 24, where said method modifies a cell, a cell line or an organism by manipulation of one or more target sequences at genomic loci of interest.

42. The method of claim 24, wherein said deamination of said nucleotide at said target locus of interest remedies a disease caused by a G→A or C→T point mutation or a pathogenic SNP.

43. The method of claim 24, wherein said disease is selected from cancer, haemophilia, beta-thalassemia, Marfan syndrome and Wiskott-Aldrich syndrome.

44. The method of claim 24, wherein said deamination of said nucleotide at said target locus of interest remedies a disease caused by a T→C or A→G point mutation or a pathogenic SNP.

45. The method of claim 24, wherein said deamination of said nucleotide at said target locus of interest inactivates a target gene at said target locus.

46. The method of claim 24, wherein the engineered adenosine deaminase, or one or more components of the system are delivered by liposomes, nanoparticles, exosomes, microvesicles, nucleic acid nanoassemblies, a gene gun, an implantable device, or the vector system of claim 302.

47. The method of claim 24, wherein modification of the nucleotide modifies gene product encoded at the target locus or expression of the gene product.

48. The engineered adenosine deaminase of any one of claims 1-10 or the system of any one of claims 17-23, wherein the adenosine protein or catalytic domain thereof comprises a mutation on S375 based on amino acid sequence positions of hADAR2-D, and a corresponding mutation in a homologous ADAR protein.

49. The engineered adenosine deaminase or the system of claim 48, wherein the mutation on S375 is S375N.

50. An engineered CRISPR-Cas protein comprising one or more HEPN domains and further comprising one or more modified amino acids, wherein the amino acids:
a. interact with a guide RNA that forms a complex with the engineered CRISPR-Cas protein;
b. are in a HEPN active site, an inter-domain linker domain, a lid domain, a helical domain 1, a helical domain 2, or a bridge helix domain of the engineered CRISPR-Cas protein; or
c. a combination thereof.

51. The engineered CRISPR-Cas protein of claim 50, wherein the HEPN domain comprises a RxxxxH motif.

52. The engineered CRISPR-Cas protein of claim 51, wherein the RxxxxH motif comprises a R{N/H/K}X₁X₂X₃H sequence.

53. The engineered CRISPR-Cas protein of claim 52, wherein:
X₁ is R, S, D, E, Q, N, G, or Y,
X₂ is independently I, S, T, V, or L, and
X₃ is independently L, F, N, Y, V, I, S, D, E, or A.

54. The engineered CRISPR-Cas protein of claim 50, wherein the CRISPR-Cas protein is a Type VI CRISPR-Cas protein.

55. The engineered CRISPR-Cas protein of claim 54, wherein the Type VI CRISPR-Cas protein is a Cas13.

56. The engineered CRISPR-Cas protein of claim 55, wherein the Type VI CRISPR-Cas protein is Cas13a, Cas13b, Cas13c, or Cas13d.

57. The engineered CRISPR-Cas protein of claim 55, comprising one or more mutation of an amino acid corresponding to the following amino acids of Prevotella buccae Cas13b (PbCas13b): T405, H407, K457, H500, K570, K590, N634, R638, N652, N653, K655, S658, K741, K744, N756, S757, R762, R791, K846, K857, K870, R877, K183, K193, R600, K607, K612, R614, K617, K826, K828, K829, R824, R830, Q831, K835, K836, R838, R618, D434, K431, R53, K943, R1041, Y164, R285, R287, K292, E296, N297, Q646, N647, R402, K393, N653, N652, R482, N480, D396, E397, D398, E399, K294, E400, R56, N157, H161, H452, N455, K484, N486, G566, H567, A656, V795, A796, W842, K871, E873, R874, R1068, N1069, or H1073.

58. The engineered CRISPR-Cas protein of claim 55, comprising one or more mutation of an amino acid corresponding to the following amino acids of Prevotella buccae Cas13b (PbCas13b): H407, K457, H500, K570, K590, N634, R638, N652, N653, K655, S658, K741, K744, N756, S757, R762, R791, K846, K857, K870, R877, K183, K193, R600, K607, K612, R614, K617, K826, K828, K829, R824, R830, Q831, K835, K836, R838, R618, D434, K431, R53, K943, R1041, Y164, R285, R287, K292, E296, N297, Q646, N647, R402, K393, N653, N652, R482, N480, D396, E397, D398, E399, K294, E400, R56, N157, H161, H452, N455, K484, N486, G566, H567, W842, K871, E873, R874, R1068, N1069, or H1073.

59. The engineered CRISPR-Cas protein of claim 55 comprising one or more mutation of an amino acid corresponding to the following amino acids of Prevotella buccae Cas13b (PbCas13b): T405, H407, K457, H500, K570, K590, N634, R638, N652, N653, K655, S658, K741, K744, N756, S757, R762, R791, K846, K857, K870, R877, K183, K193, R600, K607, K612, R614, K617, K826, K828, K829, R824, R830, Q831, K835, K836, R838, R618, D434, K431, R53, K943, R1041, Y164, R285, R287, K292, E296, N297, Q646, N647, R402, K393, N653, N652, R482, N480, D396, E397, D398, E399, K294, or E400.

60. The engineered CRISPR-Cas protein of claim 55 comprising one or more mutation of an amino acid corresponding to the following amino acids of Prevotella buccae Cas13b (PbCas13b): K393, R402, N482, T405, H407, S658, N653, A656, K655, N652, H567, N455, H500, K871, K857, K870, W842, E873, R877, K846, R874, R762, V795, A796, R791, G566, K590, R638, H452, S757, N756, N486, K484, N480, K457, K741, R56, N157, H161, R1068, N1069, or H1073.

61. The engineered CRISPR-Cas protein of claim 55 comprising one or more mutation of an amino acid corresponding to the following amino acids of PbCas13b: K393, R402, N482, H407, S658, N653, K655, N652, H567, N455, H500, K871, K857, K870, W842, E873, R877, K846, R874, R762, R791, G566, K590, R638, H452, S757, N756, N486, K484, N480, K457, K741, R56, N157, H161, R1068, N1069, or H1073.

62. The engineered CRISPR-Cas protein of claim 55 comprising one or more mutation of an amino acid corresponding to the following amino acids of PbCas13b: W842, K846, K870, E873, or R877.

63. The engineered CRISPR-Cas protein of claim 55 comprising in helical domain 1 one or more mutation of an amino acid corresponding to the following amino acids in helical domain 1 of PbCas13b: W842, K846, K870, E873, or R877.

64. The engineered CRISPR-Cas protein of claim 55 comprising in helical domain 1-3 one or more mutation of an amino acid corresponding to the following amino acids in helical domain 1-3 of PbCas13b: W842, K846, K870, E873, or R877.

65. The engineered CRISPR-Cas protein of claim 55 comprising in the bridge helix domain one or more mutation of an amino acid corresponding to the following amino acids in the bridge helix domain of PbCas13b: W842, K846, K870, E873, or R877.

66. The engineered CRISPR-Cas protein of claim 55 comprising one or more mutation of an amino acid corresponding to the following amino acids of PbCas13b: K393, R402, N480, N482, N652, or N653.

67. The engineered CRISPR-Cas protein of claim 55 comprising one or more mutation of an amino acid corresponding to the following amino acids of PbCas13b: K393, R402, N480, or N482.

68. The engineered CRISPR-Cas protein of claim 55 comprising in the LID domain one or more mutation of an amino acid corresponding to the following amino acids in the LID domain of PbCas13b: K393, R402, N480, or N482.

69. The engineered CRISPR-Cas protein of claim 55 comprising one or more mutation of an amino acid corresponding to the following amino acids of PbCas13b: N652 or N653.

70. The engineered CRISPR-Cas protein of claim 55 comprising in helical domain 2 one or more mutation of an amino acid corresponding to the following amino acids in helical domain 2 of PbCas13b: N652 or N653.

71. The engineered CRISPR-Cas protein of claim 55 comprising one or more mutation of an amino acid corresponding to the following amino acids of PbCas13b: T405, H407, S658, N653, A656, K655, N652, H567, N455, H500, K871, K857, K870, W842, E873, R877, K846, R874, R762, V795, A796, R791, G566, K590, R638, H452, S757, N756, N486, K484, N480, K457, or K741.

72. The engineered CRISPR-Cas protein of claim 55 comprising one or more mutation of an amino acid corresponding to the following amino acids of PbCas13b: H407, S658, N653, K655, N652, H567, N455, H500, K871, K857, K870, W842, E873, R877, K846, R874, R762, R791, G566, K590, R638, H452, S757, N756, N486, K484, N480, K457, or K741.

73. The engineered CRISPR-Cas protein of claim 55 comprising one or more mutation of an amino acid corresponding to the following amino acids of PbCas13b: S658, N653, A656, K655, N652, H567, H500, K871, K857, K870, W842, E873, R877, K846, R874, R762, V795, A796, R791, G566, K590, R638, S757, N756, or K741.

74. The engineered CRISPR-Cas protein of claim 55 comprising in a helical domain one or more mutation of an amino acid corresponding to the following amino acids in a helical domain of PbCas13b: S658, N653, A656, K655, N652, H567, H500, K871, K857, K870, W842, E873, R877, K846, R874, R762, V795, A796, R791, G566, K590, R638, S757, N756, or K741.

75. The engineered CRISPR-Cas protein of claim 55 comprising one or more mutation of an amino acid corresponding to the following amino acids of PbCas13b: H567, H500, K871, K857, K870, W842, E873, R877, K846, R874, R762, V795, A796, R791, G566, S757, or N756.

76. The engineered CRISPR-Cas protein of claim 55 comprising in helical domain 1 one or more mutation of an amino acid corresponding to the following amino acids in helical domain 1 of PbCas13b: H567, H500, K871, K857, K870, W842, E873, R877, K846, R874, R762, V795, A796, R791, G566, S757, or N756.

77. The engineered CRISPR-Cas protein of claim 55 comprising one or more mutation of an amino acid corresponding to the following amino acids of PbCas13b: H567, H500, R762, V795, A796, R791, G566, S757, or N756.

78. The engineered CRISPR-Cas protein of claim 55 comprising in helical domain 1 one or more mutation of an amino acid corresponding to the following amino acids in helical domain 1 of PbCas13b: H567, H500, R762, V795, A796, R791, G566, S757, or N756.

79. The engineered CRISPR-Cas protein of claim 55 comprising one or more mutation of an amino acid corresponding to the following amino acids of PbCas13b: K871, K857, K870, W842, E873, R877, K846, or R874.

80. The engineered CRISPR-Cas protein of claim 55 comprising in the bridge helix domain one or more mutation of an amino acid corresponding to the following amino acids in the bridge helix domain of PbCas13b: K871, K857, K870, W842, E873, R877, K846, or R874.

81. The engineered CRISPR-Cas protein of claim 55 comprising one or more mutation of an amino acid corresponding to the following amino acids of PbCas13b: H567, H500, or G566.

82. The engineered CRISPR-Cas protein of claim 55 comprising in helical domain 1-2 one or more mutation of an amino acid corresponding to the following amino acids in helical domain 1-2 of PbCas13b: H567, H500, or G566.

83. The engineered CRISPR-Cas protein of claim 55 comprising one or more mutation of an amino acid corresponding to the following amino acids of PbCas13b: K871, K857, K870, W842, E873, R877, K846, R874, R762, V795, A796, R791, S757, or N756.

84. The engineered CRISPR-Cas protein of claim 55 comprising in helical domain 1-3 one or more mutation of an amino acid corresponding to the following amino acids in helical domain 1-3 of PbCas13b: K871, K857, K870, W842, E873, R877, K846, R874, R762, V795, A796, R791, S757, or N756.

85. The engineered CRISPR-Cas protein of claim 55 comprising one or more mutation of an amino acid corresponding to the following amino acids of PbCas13b: R762, V795, A796, R791, S757, or N756.

86. The engineered CRISPR-Cas protein of claim 55 comprising in helical domain 1-3 one or more mutation of an amino acid corresponding to the following amino acids in helical domain 1-3 of PbCas13b: R762, V795, A796, R791, S757, or N756.

87. The engineered CRISPR-Cas protein of claim 55 comprising one or more mutation of an amino acid corresponding to the following amino acids of PbCas13b: S658, N653, A656, K655, N652, K590, R638, or K741.

88. The engineered CRISPR-Cas protein of claim 55 comprising in helical domain 2 one or more mutation of an amino acid corresponding to the following amino acids in helical domain 2 of PbCas13b: S658, N653, A656, K655, N652, K590, R638, or K741.

89. The engineered CRISPR-Cas protein of claim 55 comprising one or more mutation of an amino acid corresponding to the following amino acids of PbCas13b: T405, H407, N486, K484, N480, H452, N455, or K457.

90. The engineered CRISPR-Cas protein of claim 55 comprising in the LID domain one or more mutation of an amino acid corresponding to the following amino acids in the LID domain of PbCas13b: T405, H407, N486, K484, N480, H452, N455, or K457.

91. The engineered CRISPR-Cas protein of claim 55 comprising one or more mutation of an amino acid corresponding to the following amino acids of PbCas13b: S658, N653, K655, N652, H567, H500, K871, K857, K870, W842, E873, R877, K846, R874, R762, R791, G566, K590, R638, S757, N756, or K741.

92. The engineered CRISPR-Cas protein of claim 55 comprising in a helical domain one or more mutation of an amino acid corresponding to the following amino acids in a helical domain of PbCas13b: S658, N653, K655, N652, H567, H500, K871, K857, K870, W842, E873, R877, K846, R874, R762, R791, G566, K590, R638, S757, N756, or K741.

93. The engineered CRISPR-Cas protein of claim 55 comprising one or more mutation of an amino acid corresponding to the following amino acids of PbCas13b: H567, H500, K871, K857, K870, W842, E873, R877, K846, R874, R762, R791, G566, S757, or N756.

94. The engineered CRISPR-Cas protein of claim 55 comprising in helical domain 1 one or more mutation of an amino acid corresponding to the following amino acids in helical domain 1 of PbCas13b: H567, H500, K871, K857, K870, W842, E873, R877, K846, R874, R762, R791, G566, S757, or N756.

95. The engineered CRISPR-Cas protein of claim 55 comprising one or more mutation of an amino acid corresponding to the following amino acids of PbCas13b: H567, H500, R762, R791, G566, S757, or N756.

96. The engineered CRISPR-Cas protein of claim 55 comprising in helical domain 1 one or more mutation of an amino acid corresponding to the following amino acids in helical domain 1 of PbCas13b: H567, H500, R762, R791, G566, S757, or N756.

97. The engineered CRISPR-Cas protein of claim 55 comprising one or more mutation of an amino acid corresponding to the following amino acids of PbCas13b: K871, K857, K870, W842, E873, R877, K846, R874, R762, R791, S757, or N756.

98. The engineered CRISPR-Cas protein of claim 55 comprising in helical domain 1-3 one or more mutation of an amino acid corresponding to the following amino acids in helical domain 1-3 of PbCas13b: K871, K857, K870, W842, E873, R877, K846, R874, R762, R791, S757, or N756.

99. The engineered CRISPR-Cas protein of claim 55 comprising one or more mutation of an amino acid corresponding to the following amino acids of PbCas13b: R762, R791, S757, or N756.

100. The engineered CRISPR-Cas protein of claim 55 comprising in helical domain 1-3 one or more mutation of an amino acid corresponding to the following amino acids in helical domain 1-3 of PbCas13b: R762, R791, S757, or N756.

101. The engineered CRISPR-Cas protein of claim 55 comprising one or more mutation of an amino acid corresponding to the following amino acids of PbCas13b: S658, N653, K655, N652, K590, R638, or K741.

102. The engineered CRISPR-Cas protein of claim 55 comprising in helical domain 2 one or more mutation of an amino acid corresponding to the following amino acids in helical domain 2 of PbCas13b: S658, N653, K655, N652, K590, R638, or K741.

103. The engineered CRISPR-Cas protein of claim 55 comprising one or more mutation of an amino acid corresponding to the following amino acids of PbCas13b: H407, N486, K484, N480, H452, N455, or K457.

104. The engineered CRISPR-Cas protein of claim 55 comprising in the LID domain one or more mutation of an amino acid corresponding to the following amino acids in the LID domain of PbCas13b: H407, N486, K484, N480, H452, N455, or K457.

105. The engineered CRISPR-Cas protein of claim 55 comprising one or more mutation of an amino acid corresponding to the following amino acids of PbCas13b: R56, N157, H161, R1068, N1069, or H1073.

106. The engineered CRISPR-Cas protein of claim 55 comprising in a HEPN domain one or more mutation of an amino acid corresponding to the following amino acids in a HEPN domain of PbCas13b: R56, N157, H161, R1068, N1069, or H1073.

107. The engineered CRISPR-Cas protein of claim 55 comprising one or more mutation of an amino acid corresponding to the following amino acids of PbCas13b: R56, N157, or H161.

108. The engineered CRISPR-Cas protein of claim 55 comprising in HEPN domain 1 one or more mutation of an amino acid corresponding to the following amino acids in HEPN domain 1 of PbCas13b: R56, N157, or H161.

109. The engineered CRISPR-Cas protein of claim 55 comprising one or more mutation of an amino acid corresponding to the following amino acids of PbCas13b: R1068, N1069, or H1073.

110. The engineered CRISPR-Cas protein of claim 55 comprising in HEPN domain 2 one or more mutation of an amino acid corresponding to the following amino acids in HEPN domain 2 of PbCas13b: R1068, N1069, or H1073.

111. The engineered CRISPR-Cas protein of claim 55 comprising one or more mutation of an amino acid corresponding to the following amino acids of PbCas13b: K393, R402, N482, T405, H407, N486, K484, N480, H452, N455, or K457.

112. The engineered CRISPR-Cas protein of claim 55 comprising in the LID domain one or more mutation of an amino acid corresponding to the following amino acids in the LID domain of PbCas13b: K393, R402, N482, T405, H407, N486, K484, N480, H452, N455, or K457.

113. The engineered CRISPR-Cas protein of claim 55 comprising one or more mutation of an amino acid corresponding to the following amino acids of PbCas13b: K393, R402, N482, H407, N486, K484, N480, H452, N455, or K457.

114. The engineered CRISPR-Cas protein of claim 55 comprising in the LID domain one or more mutation of an amino acid corresponding to the following amino acids in the LID domain of PbCas13b: K393, R402, N482, H407, N486, K484, N480, H452, N455, or K457.

115. The engineered CRISPR-Cas protein of claim 55 comprising one or more mutation of an amino acid corresponding to the following amino acids of PbCas13b: T405, H407, S658, N653, A656, K655, N652, H567, N455, H500, K871, K857, K870, W842, E873, R877, K846, R874, R762, V795, A796, R791, G566, K590, R638, H452, S757, N756, N486, K484, N480, K457, K741, K393, R402, or N482.

116. The engineered CRISPR-Cas protein of claim 55 comprising one or more mutation of an amino acid corresponding to the following amino acids of PbCas13b: H407, S658, N653, K655, N652, H567, N455, H500, K871, K857, K870, W842, E873, R877, K846, R874, R762, R791, G566, K590, R638, H452, S757, N756, N486, K484, N480, K457, K741, K393, R402, or N482.

117. The engineered CRISPR-Cas protein of claim 55 comprising one or more mutation of an amino acid corresponding to the following amino acids of PbCas13b: S658, N653, A656, K655, N652, H567, N455, H500, K871, K857, K870, W842, E873, R877, K846, R874, R762, V795, A796, R791, G566, K590, R638, H452, S757, N756, N486, K484, N480, K457, or K741.

118. The engineered CRISPR-Cas protein of claim 55 comprising one or more mutation of an amino acid corresponding to the following amino acids of PbCas13b: S658, N653, K655, N652, H567, N455, H500, K871, K857, K870, W842, E873, R877, K846, R874, R762, R791, G566, K590, R638, H452, S757, N756, N486, K484, N480, K457, or K741.

119. The engineered CRISPR-Cas protein of claim 55 comprising one or more mutation of an amino acid corresponding to the following amino acids of PbCas13b: N486, K484, N480, H452, N455, or K457.

120. The engineered CRISPR-Cas protein of claim 55 comprising in the LID domain one or more mutation of an amino acid corresponding to the following amino acids in the LID domain of PbCas13b: N486, K484, N480, H452, N455, or K457.

121. The engineered CRISPR-Cas protein of claim 55 comprising one or more mutation of an amino acid corresponding to the following amino acids of PbCas13b: K393, R402, N482, N486, K484, N480, H452, N455, or K457.

122. The engineered CRISPR-Cas protein of claim 55 comprising in the LID domain one or more mutation of an amino acid corresponding to the following amino acids in the LID domain of PbCas13b: K393, R402, N482, N486, K484, N480, H452, N455, or K457.

123. The engineered CRISPR-Cas protein of claim 55 comprising one or more mutation of an amino acid corresponding to the following amino acids of PbCas13b: S658, N653, A656, K655, N652, H567, N455, H500, K871, K857, K870, W842, E873, R877, K846, R874, R762, V795, A796, R791, G566, K590, R638, H452, S757, N756, N486, K484, N480, K457, K741, K393, R402, or N482.

124. The engineered CRISPR-Cas protein of claim 55 comprising one or more mutation of an amino acid corresponding to the following amino acids of PbCas13b: S658, N653, K655, N652, H567, N455, H500, K871, K857, K870, W842, E873, R877, K846, R874, R762, R791, G566, K590, R638, H452, S757, N756, N486, K484, N480, K457, K741, K393, R402, or N482.

125. The engineered CRISPR-Cas protein of claim 55 comprising one or more mutation of an amino acid corresponding to the following amino acids of Prevotella buccae Cas13b (PbCas13b): R53, Y164, K943, or R1041.

126. The engineered CRISPR-Cas protein of claim 55 comprising one or more mutation of an amino acid corresponding to the following amino acids of Prevotella buccae Cas13b (PbCas13b): R53 or Y164.

127. The engineered CRISPR-Cas protein of claim 55 comprising one or more mutation of an amino acid corresponding to the following amino acids of Prevotella buccae Cas13b (PbCas13b): K943 or R1041.

128. The engineered CRISPR-Cas protein of claim 55 comprising in a HEPN domain one or more mutation of an amino acid corresponding to the following amino acids in a HEPN domain of Prevotella buccae Cas13b (PbCas13b): R53, Y164, K943, or R1041.

129. The engineered CRISPR-Cas protein of claim 55 comprising in HEPN domain 1 one or more mutation of an amino acid corresponding to the following amino acids in HEPN domain 1 of Prevotella buccae Cas13b (PbCas13b): R53 or Y164.

130. The engineered CRISPR-Cas protein of claim 55 comprising in HEPN domain 2 one or more mutation of an amino acid corresponding to the following amino acids in HEPN domain 2 of Prevotella buccae Cas13b (PbCas13b): K943 or R1041.

131. The engineered CRISPR-Cas protein of claim 55 comprising one or more mutation of an amino acid corresponding to the following amino acids of Prevotella buccae Cas13b (PbCas13b): R53, Y164, K943, R1041, R56, N157, H161, R1068, N1069, or H1073.

132. The engineered CRISPR-Cas protein of claim 55 comprising one or more mutation of an amino acid corresponding to the following amino acids of Prevotella buccae Cas13b (PbCas13b): R53, Y164, R56, N157, or H161.

133. The engineered CRISPR-Cas protein of claim 55 comprising one or more mutation of an amino acid corresponding to the following amino acids of Prevotella buccae Cas13b (PbCas13b): K943, R1041, R1068, N1069, or H1073.

134. The engineered CRISPR-Cas protein of claim 55 comprising in a HEPN domain one or more mutation of an amino acid corresponding to the following amino acids in a HEPN domain of Prevotella buccae Cas13b (PbCas13b): R53, Y164, K943, R1041, R56, N157, H161, R1068, N1069, or H1073.

135. The engineered CRISPR-Cas protein of claim 55 comprising in HEPN domain 1 one or more mutation of an amino acid corresponding to the following amino acids in HEPN domain 1 of Prevotella buccae Cas13b (PbCas13b): R53, Y164, R56, N157, or H161.

136. The engineered CRISPR-Cas protein of claim 55 comprising in HEPN domain 2 one or more mutation of an amino acid corresponding to the following amino acids in HEPN domain 2 of Prevotella buccae Cas13b (PbCas13b): K943, R1041, R1068, N1069, or H1073.

137. The engineered CRISPR-Cas protein of claim 55 comprising one or more mutation of an amino acid corresponding to the following amino acids of Prevotella buccae Cas13b (PbCas13b): R53, Y164, K183, K193, K943, or R1041.

138. The engineered CRISPR-Cas protein of claim 55 comprising one or more mutation of an amino acid corresponding to the following amino acids of Prevotella buccae Cas13b (PbCas13b): R53, Y164, K183, or K193.

139. The engineered CRISPR-Cas protein of claim 55 comprising one or more mutation of an amino acid corresponding to the following amino acids of Prevotella buccae Cas13b (PbCas13b): K943 or R1041.

140. The engineered CRISPR-Cas protein of claim 55 comprising in a HEPN domain one or more mutation of an amino acid corresponding to the following amino acids in a HEPN domain of Prevotella buccae Cas13b (PbCas13b): R53, Y164, K183, K193, K943, or R1041.

141. The engineered CRISPR-Cas protein of claim 55 comprising in HEPN domain 1 one or more mutation of an amino acid corresponding to the following amino acids in HEPN domain 1 of Prevotella buccae Cas13b (PbCas13b): R53, Y164, K183, or K193.

142. The engineered CRISPR-Cas protein of claim 55 comprising in HEPN domain 2 one or more mutation of an amino acid corresponding to the following amino acids in HEPN domain 2 of Prevotella buccae Cas13b (PbCas13b): K943 or R1041.

143. The engineered CRISPR-Cas protein of claim 55 comprising one or more mutation of an amino acid corresponding to the following amino acids of Prevotella buccae Cas13b (PbCas13b): R53, Y164, K183, K193, K943, R1041, R56, N157, H161, R1068, N1069, or H1073.

144. The engineered CRISPR-Cas protein of claim 55 comprising one or more mutation of an amino acid corresponding to the following amino acids of Prevotella buccae Cas13b (PbCas13b): R53, Y164, K183, K193, R56, N157, or H161.

145. The engineered CRISPR-Cas protein of claim 55 comprising one or more mutation of an amino acid corresponding to the following amino acids of Prevotella buccae Cas13b (PbCas13b): K943, R1041, R1068, N1069, or H1073.

146. The engineered CRISPR-Cas protein of claim 55 comprising in a HEPN domain one or more mutation of an amino acid corresponding to the following amino acids in a HEPN domain of Prevotella buccae Cas13b (PbCas13b): R53, Y164, K183, K193, K943, R1041, R56, N157, H161, R1068, N1069, or H1073.

147. The engineered CRISPR-Cas protein of claim 55 comprising in HEPN domain 1 one or more mutation of an amino acid corresponding to the following amino acids in HEPN domain 1 of Prevotella buccae Cas13b (PbCas13b): R53, Y164, K183, K193, R56, N157, or H161.

148. The engineered CRISPR-Cas protein of claim 55 comprising in HEPN domain 2 one or more mutation of an amino acid corresponding to the following amino acids in HEPN domain 2 of Prevotella buccae Cas13b (PbCas13b): K943, R1041, R1068, N1069, or H1073.

149. The engineered CRISPR-Cas protein of claim 55 comprising one or more mutation of an amino acid corresponding to the following amino acids of Prevotella buccae Cas13b (PbCas13b): K183 or K193.

150. The engineered CRISPR-Cas protein of claim 55 comprising in HEPN domain 1 one or more mutation of an amino acid corresponding to the following amino acids in HEPN domain 1 of Prevotella buccae Cas13b (PbCas13b): K183 or K193.

151. The engineered CRISPR-Cas protein of claim 55 comprising one or more mutation of an amino acid corresponding to the following amino acids of Prevotella buccae Cas13b (PbCas13b): R53, Y164, K943, or R1041.

152. The engineered CRISPR-Cas protein of claim 55 comprising in a HEPN domain one or more mutation of an amino acid corresponding to the following amino acids in a HEPN domain of Prevotella buccae Cas13b (PbCas13b): R53, Y164, K943, or R1041.

153. The engineered CRISPR-Cas protein of claim 55 comprising one or more mutation of an amino acid corresponding to the following amino acids of Prevotella buccae Cas13b (PbCas13b): R53, K943, or R1041; preferably R53A, R53K, R53D, or R53E; K943A, K943R, K943D, or K943E; or R1041A, R1041K, R1041D, or R1041E.

154. The engineered CRISPR-Cas protein of claim 55 comprising in a HEPN domain one or more mutation of an amino acid corresponding to the following amino acids in a HEPN domain of Prevotella buccae Cas13b (PbCas13b): R53, K943, or R1041; preferably R53A, R53K, R53D, or R53E; K943A, K943R, K943D, or K943E; or R1041A, R1041K, R1041D, or R1041E.

155. The engineered CRISPR-Cas protein of claim 55 comprising a mutation of an amino acid corresponding to amino acid Y164 of Prevotella buccae Cas13b (PbCas13b), preferably Y164A, Y164F, or Y164W.

156. The engineered CRISPR-Cas protein of claim 55 comprising HEPN domain 1 a mutation of an amino acid corresponding to amino acid Y164 HEPN domain 1 of Prevotella buccae Cas13b (PbCas13b), preferably Y164A, Y164F, or Y164W.

157. The engineered CRISPR-Cas protein of claim 55 comprising one or more mutation of an amino acid corresponding to the following amino acids of Prevotella buccae Cas13b (PbCas13b): T405, H407, K457, D434, K431, R402, K393, R482, N480, D396, E397, D398, or E399.

158. The engineered CRISPR-Cas protein of claim 55 comprising in the LID domain one or more mutation of an amino acid corresponding to the following amino acids in the LID domain of Prevotella buccae Cas13b (PbCas13b): T405, H407, K457, D434, K431, R402, K393, R482, N480, D396, E397, D398, or E399.

159. The engineered CRISPR-Cas protein of claim 55 comprising a mutation of an amino acid corresponding to amino acid H407 of Prevotella buccae Cas13b (PbCas13b), preferably H407Y, H407W, or H407F.

160. The engineered CRISPR-Cas protein of claim 55 comprising one or more mutation of an amino acid corresponding to the following amino acids of Prevotella buccae Cas13b (PbCas13b): R402, K393, R482, N480, D396, E397, D398, or E399.

161. The engineered CRISPR-Cas protein of claim 55 comprising in the LID domain one or more mutation of an amino acid corresponding to the following amino acids in the LID domain of Prevotella buccae Cas13b (PbCas13b): R402, K393, R482, N480, D396, E397, D398, or E399.

162. The engineered CRISPR-Cas protein of claim 55 comprising one or more mutation of an amino acid corresponding to the following amino acids of Prevotella buccae Cas13b (PbCas13b): K457, D434, or K431.

163. The engineered CRISPR-Cas protein of claim 55 comprising in the LID domain one or more mutation of an amino acid corresponding to the following amino acids in the LID domain of Prevotella buccae Cas13b (PbCas13b): K457, D434, or K431.

164. The engineered CRISPR-Cas protein of claim 55 comprising one or more mutation of an amino acid corresponding to the following amino acids of Prevotella buccae Cas13b (PbCas13b): H500, K570, K590, N634, R638, N652, N653, K655, S658, K741, K744, N756, S757, R762, R791, K846, K857, K870, R877, R600, K607, K612, R614, K617, K826, K828, K829, R824, R830, Q831, K835, K836, R838, R618, Q646, N647, N653, or N652.

165. The engineered CRISPR-Cas protein of claim 55 comprising in a helical domain one or more mutation of an amino acid corresponding to the following amino acids in a helical domain of Prevotella buccae Cas13b (PbCas13b): H500, K570, K590, N634, R638, N652, N653, K655, S658, K741, K744, N756, S757, R762, R791, K846, K857, K870, R877, R600, K607, K612, R614, K617, K826, K828, K829, R824, R830, Q831, K835, K836, R838, R618, Q646, N647, N653, or N652.

166. The engineered CRISPR-Cas protein of claim 55 comprising one or more mutation of an amino acid corresponding to the following amino acids of Prevotella buccae Cas13b (PbCas13b): H500, K570, N756, S757, R762, R791, K846, K857, K870, R877, K826, K828, K829, R824, R830, Q831, K835, K836, or R838.

167. The engineered CRISPR-Cas protein of claim 55 comprising in helical domain 1 one or more mutation of an amino acid corresponding to the following amino acids in helical domain 1 of Prevotella buccae Cas13b (PbCas13b): H500, K570, N756, S757, R762, R791, K846, K857, K870, R877, K826, K828, K829, R824, R830, Q831, K835, K836, or R838.

168. The engineered CRISPR-Cas protein of claim 55 comprising one or more mutation of an amino acid corresponding to the following amino acids of Prevotella buccae Cas13b (PbCas13b): H500, K570, N756, S757, R762, or R791.

169. The engineered CRISPR-Cas protein of claim 55 comprising in helical domain 1 one or more mutation of an amino acid corresponding to the following amino acids in helical domain 1 of Prevotella buccae Cas13b (PbCas13b): H500, K570, N756, S757, R762, or R791.

170. The engineered CRISPR-Cas protein of claim 55 comprising one or more mutation of an amino acid corresponding to the following amino acids of Prevotella buccae Cas13b (PbCas13b): K846, K857, K870, R877, K826, K828, K829, R824, R830, Q831, K835, K836, or R838.

171. The engineered CRISPR-Cas protein of claim 55 comprising in the bridge helix domain one or more mutation of an amino acid corresponding to the following amino acids in the bridge helix domain of Prevotella buccae Cas13b (PbCas13b): K846, K857, K870, R877, K826, K828, K829, R824, R830, Q831, K835, K836, or R838.

172. The engineered CRISPR-Cas protein of claim 55 comprising one or more mutation of an amino acid corresponding to the following amino acids of Prevotella buccae Cas13b (PbCas13b): H500 or K570.

173. The engineered CRISPR-Cas protein of claim 55 comprising in helical domain 1-2 one or more mutation of an amino acid corresponding to the following amino acids in helical domain 1-2 of Prevotella buccae Cas13b (PbCas13b): H500 or K570.

174. The engineered CRISPR-Cas protein of claim 55 comprising one or more mutation of an amino acid corresponding to the following amino acids of Prevotella buccae Cas13b (PbCas13b): N756, S757, R762, R791, K846, K857, K870, R877, K826, K828, K829, R824, R830, Q831, K835, K836, or R838.

175. The engineered CRISPR-Cas protein of claim 55 comprising in helical domain 1-3 one or more mutation of an amino acid corresponding to the following amino acids in helical domain 1-3 of Prevotella buccae Cas13b (PbCas13b): N756, S757, R762, R791, K846, K857, K870, R877, K826, K828, K829, R824, R830, Q831, K835, K836, or R838.

176. The engineered CRISPR-Cas protein of claim 55 comprising one or more mutation of an amino acid corresponding to the following amino acids of Prevotella buccae Cas13b (PbCas13b): N756, S757, R762, or R791.

177. The engineered CRISPR-Cas protein of claim 55 comprising in helical domain 1-3 one or more mutation of an amino acid corresponding to the following amino acids in helical domain 1-3 of Prevotella buccae Cas13b (PbCas13b): N756, S757, R762, or R791.

178. The engineered CRISPR-Cas protein of claim 55 comprising one or more mutation of an amino acid corresponding to the following amino acids of Prevotella buccae Cas13b (PbCas13b): N756, S757, R762, R791, K846, K857, K870, or R877.

179. The engineered CRISPR-Cas protein of claim 55 comprising in helical domain 1-3 one or more mutation of an amino acid corresponding to the following amino acids in helical domain 1-3 of Prevotella buccae Cas13b (PbCas13b): N756, S757, R762, R791, K846, K857, K870, or R877.

180. The engineered CRISPR-Cas protein of claim 55 comprising one or more mutation of an amino acid corresponding to the following amino acids of Prevotella buccae Cas13b (PbCas13b): K826, K828, K829, R824, R830, Q831, K835, K836, or R838.

181. The engineered CRISPR-Cas protein of claim 55 comprising in helical domain 1-3 one or more mutation of an amino acid corresponding to the following amino acids in helical domain 1-3 of Prevotella buccae Cas13b (PbCas13b): K826, K828, K829, R824, R830, Q831, K835, K836, or R838.

182. The engineered CRISPR-Cas protein of claim 55 comprising one or more mutation of an amino acid corresponding to the following amino acids of Prevotella buccae Cas13b (PbCas13b): K590, N634, R638, N652, N653, K655, S658, K741, K744, R600, K607, K612, R614, K617, R618, Q646, N647, N653, or N652.

183. The engineered CRISPR-Cas protein of claim 55 comprising in helical domain 2 one or more mutation of an amino acid corresponding to the following amino acids in helical domain 2 of Prevotella buccae Cas13b (PbCas13b): K590, N634, R638, N652, N653, K655, S658, K741, K744, R600, K607, K612, R614, K617, R618, Q646, N647, N653, or N652.

184. The engineered CRISPR-Cas protein of claim 55 comprising one or more mutation of an amino acid corresponding to the following amino acids of Prevotella buccae Cas13b (PbCas13b): Q646 or N647.

185. The engineered CRISPR-Cas protein of claim 55 comprising in helical domain 2 one or more mutation of an amino acid corresponding to the following amino acids in helical domain 2 of Prevotella buccae Cas13b (PbCas13b): Q646 or N647.

186. The engineered CRISPR-Cas protein of claim 55 comprising one or more mutation of an amino acid corresponding to the following amino acids of Prevotella buccae Cas13b (PbCas13b): N653 or N652.

187. The engineered CRISPR-Cas protein of claim 55 comprising in helical domain 2 one or more mutation of an amino acid corresponding to the following amino acids in helical domain 2 of Prevotella buccae Cas13b (PbCas13b): N653 or N652.

188. The engineered CRISPR-Cas protein of claim 55 comprising one or more mutation of an amino acid corresponding to the following amino acids of Prevotella buccae Cas13b (PbCas13b): K590, N634, R638, N652, N653, K655, S658, K741, or K744.

189. The engineered CRISPR-Cas protein of claim 55 comprising in helical domain 2 one or more mutation of an amino acid corresponding to the following amino acids in helical domain 2 of Prevotella buccae Cas13b (PbCas13b): K590, N634, R638, N652, N653, K655, S658, K741, or K744.

190. The engineered CRISPR-Cas protein of claim 55 comprising one or more mutation of an amino acid corresponding to the following amino acids of Prevotella buccae Cas13b (PbCas13b): R600, K607, K612, R614, K617, or R618.

191. The engineered CRISPR-Cas protein of claim 55 comprising in helical domain 2 one or more mutation of an amino acid corresponding to the following amino acids in helical domain 2 of Prevotella buccae Cas13b (PbCas13b): R600, K607, K612, R614, K617, or R618.

192. The engineered CRISPR-Cas protein of claim 55 comprising one or more mutation of an amino acid corresponding to the following amino acids of Prevotella buccae Cas13b (PbCas13b): R285, R287, K292, E296, N297, or K294.

193. The engineered CRISPR-Cas protein of claim 55 comprising in the IDL domain one or more mutation of an amino acid corresponding to the following amino acids in the IDL domain of Prevotella buccae Cas13b (PbCas13b): R285, R287, K292, E296, N297, or K294.

194. The engineered CRISPR-Cas protein of claim 55 comprising one or more mutation of an amino acid corresponding to the following amino acids of Prevotella buccae Cas13b (PbCas13b): R285, K292, E296, or N297.

195. The engineered CRISPR-Cas protein of claim 55 comprising in the IDL domain one or more mutation of an amino acid corresponding to the following amino acids in the IDL domain of Prevotella buccae Cas13b (PbCas13b): R285, K292, E296, or N297.

196. The engineered CRISPR-Cas protein of claim 55 comprising one or more mutation of an amino acid corresponding to the following amino acids of Prevotella buccae Cas13b (PbCas13b): T405, H500, K570, K590, N634, R638, N652, N653, K655, S658, K741, K744, N756, S757, R762, R791, K846, K857, K870, R877, K183, K193, R600, K607, K612, R614, K617, K826, K828, K829, R824, R830, Q831, K835, K836, R838, R618, D434, K431, R285, R287, K292, E296, N297, Q646, N647, or K294.

197. The engineered CRISPR-Cas protein of claim 55 comprising one or more mutation of an amino acid corresponding to the following amino acids of Prevotella buccae Cas13b (PbCas13b): R402, K393, N653, N652, R482, N480, D396, E397, D398, or E399.

198. The engineered CRISPR-Cas protein of claim 55 comprising one or more mutation of an amino acid corresponding to the following amino acids of Prevotella buccae Cas13b (PbCas13b): R53, K655, R762, or R1041; preferably R53A or R53D; K655A; R762A; or R1041E or R1041D.

199. The engineered CRISPR-Cas protein of claim 55 comprising one or more mutation of an amino acid corresponding to the following amino acids of Prevotella buccae Cas13b (PbCas13b): N297, E296, K292, or R285; preferably N297A, E296A, K292A, or R285A.

200. The engineered CRISPR-Cas protein of claim 55 comprising in (the central channel of) the IDL domain one or more mutation of an amino acid corresponding to the following amino acids in (the central channel of) the IDL domain of Prevotella buccae Cas13b (PbCas13b): N297, E296, K292, or R285; preferably N297A, E296A, K292A, or R285A.

201. The engineered CRISPR-Cas protein of claim 55 comprising one or more mutation of an amino acid corresponding to the following amino acids of Prevotella buccae Cas13b (PbCas13b): Q831, K836, R838, N652, N653, R830, K655 or R762; preferably Q831A, K836A, R838A, N652A, N653A, R830A, K655A, or R762A.

202. The engineered CRISPR-Cas protein of claim 55 comprising one or more mutation of an amino acid corresponding to the following amino acids of Prevotella buccae Cas13b (PbCas13b): N652, N653, R830, K655 or R762; preferably N652A, N653A, R830A, K655A, or R762A.

203. The engineered CRISPR-Cas protein of claim 55 comprising one or more mutation of an amino acid corresponding to the following amino acids of Prevotella buccae Cas13b (PbCas13b): K655 or R762; preferably K655A or R762A.

204. The engineered CRISPR-Cas protein of claim 55 comprising in a helical domain one or more mutation of an amino acid corresponding to the following amino acids in a helical domain of Prevotella buccae Cas13b (PbCas13b): Q831, K836, R838, N652, N653, R830, K655 or R762; preferably Q831A, K836A, R838A, N652A, N653A, R830A, K655A, or R762A.

205. The engineered CRISPR-Cas protein of claim 55 comprising a helical domain one or more mutation of an amino acid corresponding to the following amino acids a helical domain of Prevotella buccae Cas13b (PbCas13b): N652, N653, R830, K655 or R762; preferably N652A, N653A, R830A, K655A, or R762A.

206. The engineered CRISPR-Cas protein of claim 55 comprising in helical domain 2 one or more mutation of an amino acid corresponding to the following amino acids in helical domain 2 of Prevotella buccae Cas13b (PbCas13b): K655 or R762; preferably K655A or R762A.

207. The engineered CRISPR-Cas protein of claim 55 comprising one or more mutation of an amino acid corresponding to the following amino acids of Prevotella buccae Cas13b (PbCas13b): R614, K607, K193, K183 or R600; preferably R614A, K607A, K193A, K183A or R600A.

208. The engineered CRISPR-Cas protein of claim 55 comprising in the trans-subunit loop of helical domain 2 one or more mutation of an amino acid corresponding to the following amino acids in the trans-subunit loop of helical domain 2 of Prevotella buccae Cas13b (PbCas13b): Q646 or N647; preferably Q646A or N647A.

209. The engineered CRISPR-Cas protein of claim 55 comprising one or more mutation of an amino acid corresponding to the following amino acids of Prevotella buccae Cas13b (PbCas13b): R53 or R1041; preferably R53A or R53D, or R1041E or R1041D.

210. The engineered CRISPR-Cas protein of claim 55 comprising in a HEPN domain one or more mutation of an amino acid corresponding to the following amino acids in a HEPN domain of Prevotella buccae Cas13b (PbCas13b): R53 or R1041; preferably R53A or R53D, or R1041E or R1041D.

211. The engineered CRISPR-Cas protein of claim 55 comprising one or more mutation of an amino acid corresponding to the following amino acids of Prevotella buccae Cas13b (PbCas13b): K457, D397, E398, D399, E400, T405, H407 or D434; preferably D397A, E398A, D399A, E400A, T405A, H407A, H407W, H407Y, H407F or D434A.

212. The engineered CRISPR-Cas protein of claim 55 comprising in the LID domain one or more mutation of an amino acid corresponding to the following amino acids in the LID domain of Prevotella buccae Cas13b (PbCas13b): K457, D397, E398, D399, E400, T405, H407 or D434; preferably D397A, E398A, D399A, E400A, T405A, H407A, H407W, H407Y, H407F or D434A.

213. The engineered CRISPR-Cas protein of claim 55, wherein the amino acids correspond to the following amino acids of Prevotella buccae Cas13b (PbCas13b): amino acids 46-57, 73-79, 152-164, 1036-1046, and 1064-1074.

214. The engineered CRISPR-Cas protein of claim 55, comprising one or more mutation of an amino acid corresponding to the following amino acids of Prevotella buccae Cas13b (PbCas13b): R156, N157, H161, R1068, N1069, and H1073.

215. The engineered CRISPR-Cas protein of claim 55, comprising one or more mutation of an amino acid corresponding to the following amino acids of Prevotella buccae Cas13b (PbCas13b): R285, R287, K292, K294, E296, and N297.

216. The engineered CRISPR-Cas protein of claim 55, comprising one or more mutation of an amino acid corresponding to the following amino acids of Prevotella buccae Cas13b (PbCas13b): K826, K828, K829, R824, R830, Q831, K835, K836, and R838.

217. The engineered CRISPR-Cas protein of claim 55, comprising one or more mutation of an amino acid corresponding to the following amino acids of Prevotella buccae Cas13b (PbCas13b): T405, H407, K457, H500, K570, K590, N634, R638, N652, N653, K655, S658, K741, K744, N756, S757, R762, R791, K846, K857, K870, and R877.

218. The engineered CRISPR-Cas protein of claim 55 comprising a mutation of an amino acid corresponding to amino acid T405 of Prevotella buccae Cas13b (PbCas13b).

219. The engineered CRISPR-Cas protein of claim 55 comprising a mutation of an amino acid corresponding to amino acid H407 of Prevotella buccae Cas13b (PbCas13b).

220. The engineered CRISPR-Cas protein of claim 55 comprising a mutation of an amino acid corresponding to amino acid K457 of Prevotella buccae Cas13b (PbCas13b).

221. The engineered CRISPR-Cas protein of claim 55 comprising a mutation of an amino acid corresponding to amino acid H500 of Prevotella buccae Cas13b (PbCas13b).

222. The engineered CRISPR-Cas protein of claim 55 comprising a mutation of an amino acid corresponding to amino acid K570 of Prevotella buccae Cas13b (PbCas13b).

223. The engineered CRISPR-Cas protein of claim 55 comprising a mutation of an amino acid corresponding to amino acid K590 of Prevotella buccae Cas13b (PbCas13b).

224. The engineered CRISPR-Cas protein of claim 55 comprising a mutation of an amino acid corresponding to amino acid N634 of Prevotella buccae Cas13b (PbCas13b).

225. The engineered CRISPR-Cas protein of claim 55 comprising a mutation of an amino acid corresponding to amino acid R638 of Prevotella buccae Cas13b (PbCas13b).

226. The engineered CRISPR-Cas protein of claim 55 comprising a mutation of an amino acid corresponding to amino acid N652 of Prevotella buccae Cas13b (PbCas13b).

227. The engineered CRISPR-Cas protein of claim 55 comprising a mutation of an amino acid corresponding to amino acid N653 of Prevotella buccae Cas13b (PbCas13b).

228. The engineered CRISPR-Cas protein of claim 55 comprising a mutation of an amino acid corresponding to amino acid K655 of Prevotella buccae Cas13b (PbCas13b).

229. The engineered CRISPR-Cas protein of claim 55 comprising a mutation of an amino acid corresponding to amino acid S658 of Prevotella buccae Cas13b (PbCas13b).

230. The engineered CRISPR-Cas protein of claim 55 comprising a mutation of an amino acid corresponding to amino acid K741 of Prevotella buccae Cas13b (PbCas13b).

231. The engineered CRISPR-Cas protein of claim 55 comprising a mutation of an amino acid corresponding to amino acid K744 of Prevotella buccae Cas13b (PbCas13b).

232. The engineered CRISPR-Cas protein of claim 55 comprising a mutation of an amino acid corresponding to amino acid N756 of Prevotella buccae Cas13b (PbCas13b).

233. The engineered CRISPR-Cas protein of claim 55 comprising a mutation of an amino acid corresponding to amino acid S757 of Prevotella buccae Cas13b (PbCas13b).

234. The engineered CRISPR-Cas protein of claim 55 comprising a mutation of an amino acid corresponding to amino acid R762 of Prevotella buccae Cas13b (PbCas13b).

235. The engineered CRISPR-Cas protein of claim 55 comprising a mutation of an amino acid corresponding to amino acid R791 of Prevotella buccae Cas13b (PbCas13b).

236. The engineered CRISPR-Cas protein of claim 55 comprising a mutation of an amino acid corresponding to amino acid K846 of Prevotella buccae Cas13b (PbCas13b).

237. The engineered CRISPR-Cas protein of claim 55 comprising a mutation of an amino acid corresponding to amino acid K857 of Prevotella buccae Cas13b (PbCas13b).

238. The engineered CRISPR-Cas protein of claim 55 comprising a mutation of an amino acid corresponding to amino acid K870 of Prevotella buccae Cas13b (PbCas13b).

239. The engineered CRISPR-Cas protein of claim 55 comprising a mutation of an amino acid corresponding to amino acid R877 of Prevotella buccae Cas13b (PbCas13b).

240. The engineered CRISPR-Cas protein of claim 55 comprising a mutation of an amino acid corresponding to amino acid K183 of Prevotella buccae Cas13b (PbCas13b).

241. The engineered CRISPR-Cas protein of claim 55 comprising a mutation of an amino acid corresponding to amino acid K193 of Prevotella buccae Cas13b (PbCas13b).

242. The engineered CRISPR-Cas protein of claim 55 comprising a mutation of an amino acid corresponding to amino acid R600 of Prevotella buccae Cas13b (PbCas13b).

243. The engineered CRISPR-Cas protein of claim 55 comprising a mutation of an amino acid corresponding to amino acid K607 of Prevotella buccae Cas13b (PbCas13b).

244. The engineered CRISPR-Cas protein of claim 55 comprising a mutation of an amino acid corresponding to amino acid K612 of Prevotella buccae Cas13b (PbCas13b).

245. The engineered CRISPR-Cas protein of claim 55 comprising a mutation of an amino acid corresponding to amino acid R614 of Prevotella buccae Cas13b (PbCas13b).

246. The engineered CRISPR-Cas protein of claim 55 comprising a mutation of an amino acid corresponding to amino acid K617 of Prevotella buccae Cas13b (PbCas13b).

247. The engineered CRISPR-Cas protein of claim 55 comprising a mutation of an amino acid corresponding to amino acid K826 of Prevotella buccae Cas13b (PbCas13b).

248. The engineered CRISPR-Cas protein of claim 55 comprising a mutation of an amino acid corresponding to amino acid K828 of Prevotella buccae Cas13b (PbCas13b).

249. The engineered CRISPR-Cas protein of claim 55 comprising a mutation of an amino acid corresponding to amino acid K829 of Prevotella buccae Cas13b (PbCas13b).

250. The engineered CRISPR-Cas protein of claim 55 comprising a mutation of an amino acid corresponding to amino acid R824 of Prevotella buccae Cas13b (PbCas13b).

251. The engineered CRISPR-Cas protein of claim 55 comprising a mutation of an amino acid corresponding to amino acid R830 of Prevotella buccae Cas13b (PbCas13b).

252. The engineered CRISPR-Cas protein of claim 55 comprising a mutation of an amino acid corresponding to amino acid Q831 of Prevotella buccae Cas13b (PbCas13b).

253. The engineered CRISPR-Cas protein of claim 55 comprising a mutation of an amino acid corresponding to amino acid K835 of Prevotella buccae Cas13b (PbCas13b).

254. The engineered CRISPR-Cas protein of claim 55 comprising a mutation of an amino acid corresponding to amino acid K836 of Prevotella buccae Cas13b (PbCas13b).

255. The engineered CRISPR-Cas protein of claim 55 comprising a mutation of an amino acid corresponding to amino acid R838 of Prevotella buccae Cas13b (PbCas13b).

256. The engineered CRISPR-Cas protein of claim 55 comprising a mutation of an amino acid corresponding to amino acid R618 of Prevotella buccae Cas13b (PbCas13b).

257. The engineered CRISPR-Cas protein of claim 55 comprising a mutation of an amino acid corresponding to amino acid D434 of Prevotella buccae Cas13b (PbCas13b).

258. The engineered CRISPR-Cas protein of claim 55 comprising a mutation of an amino acid corresponding to amino acid K431 of Prevotella buccae Cas13b (PbCas13b).

259. The engineered CRISPR-Cas protein of claim 55 comprising a mutation of an amino acid corresponding to amino acid R53 of Prevotella buccae Cas13b (PbCas13b).

260. The engineered CRISPR-Cas protein of claim 55 comprising a mutation of an amino acid corresponding to amino acid K943 of Prevotella buccae Cas13b (PbCas13b).

261. The engineered CRISPR-Cas protein of claim 55 comprising a mutation of an amino acid corresponding to amino acid R1041 of Prevotella buccae Cas13b (PbCas13b).

262. The engineered CRISPR-Cas protein of claim 55 comprising a mutation of an amino acid corresponding to amino acid Y164 of Prevotella buccae Cas13b (PbCas13b).

263. The engineered CRISPR-Cas protein of claim 55 comprising a mutation of an amino acid corresponding to amino acid R285 of Prevotella buccae Cas13b (PbCas13b).

264. The engineered CRISPR-Cas protein of claim 55 comprising a mutation of an amino acid corresponding to amino acid R287 of Prevotella buccae Cas13b (PbCas13b).

265. The engineered CRISPR-Cas protein of claim 55 comprising a mutation of an amino acid corresponding to amino acid K292 of Prevotella buccae Cas13b (PbCas13b).

266. The engineered CRISPR-Cas protein of claim 55 comprising a mutation of an amino acid corresponding to amino acid E296 of Prevotella buccae Cas13b (PbCas13b).

267. The engineered CRISPR-Cas protein of claim 55 comprising a mutation of an amino acid corresponding to amino acid N297 of Prevotella buccae Cas13b (PbCas13b).

268. The engineered CRISPR-Cas protein of claim 55 comprising a mutation of an amino acid corresponding to amino acid Q646 of Prevotella buccae Cas13b (PbCas13b).

269. The engineered CRISPR-Cas protein of claim 55 comprising a mutation of an amino acid corresponding to amino acid N647 of Prevotella buccae Cas13b (PbCas13b).

270. The engineered CRISPR-Cas protein of claim 55 comprising a mutation of an amino acid corresponding to amino acid R402 of Prevotella buccae Cas13b (PbCas13b).

271. The engineered CRISPR-Cas protein of claim 55 comprising a mutation of an amino acid corresponding to amino acid K393 of Prevotella buccae Cas13b (PbCas13b).

272. The engineered CRISPR-Cas protein of claim 55 comprising a mutation of an amino acid corresponding to amino acid N653 of Prevotella buccae Cas13b (PbCas13b).

273. The engineered CRISPR-Cas protein of claim 55 comprising a mutation of an amino acid corresponding to amino acid N652 of Prevotella buccae Cas13b (PbCas13b).

274. The engineered CRISPR-Cas protein of claim 55 comprising a mutation of an amino acid corresponding to amino acid R482 of Prevotella buccae Cas13b (PbCas13b).

275. The engineered CRISPR-Cas protein of claim 55 comprising a mutation of an amino acid corresponding to amino acid N480 of Prevotella buccae Cas13b (PbCas13b).

276. The engineered CRISPR-Cas protein of claim 55 comprising a mutation of an amino acid corresponding to amino acid D396 of Prevotella buccae Cas13b (PbCas13b).

277. The engineered CRISPR-Cas protein of claim 55 comprising a mutation of an amino acid corresponding to amino acid E397 of Prevotella buccae Cas13b (PbCas13b).

278. The engineered CRISPR-Cas protein of claim 55 comprising a mutation of an amino acid corresponding to amino acid D398 of Prevotella buccae Cas13b (PbCas13b).

279. The engineered CRISPR-Cas protein of claim 55 comprising a mutation of an amino acid corresponding to amino acid E399 of Prevotella buccae Cas13b (PbCas13b).

280. The engineered CRISPR-Cas protein of claim 55 comprising a mutation of an amino acid corresponding to amino acid K294 of Prevotella buccae Cas13b (PbCas13b).

281. The engineered CRISPR-Cas protein of claim 55 comprising a mutation of an amino acid corresponding to amino acid E400 of Prevotella buccae Cas13b (PbCas13b).

282. The engineered CRISPR-Cas protein of claim 55 comprising a mutation of an amino acid corresponding to amino acid R56 of Prevotella buccae Cas13b (PbCas13b).

283. The engineered CRISPR-Cas protein of claim 55 comprising a mutation of an amino acid corresponding to amino acid N157 of Prevotella buccae Cas13b (PbCas13b).

284. The engineered CRISPR-Cas protein of claim 55 comprising a mutation of an amino acid corresponding to amino acid H161 of Prevotella buccae Cas13b (PbCas13b).

285. The engineered CRISPR-Cas protein of claim 55 comprising a mutation of an amino acid corresponding to amino acid H452 of Prevotella buccae Cas13b (PbCas13b).

286. The engineered CRISPR-Cas protein of claim 55 comprising a mutation of an amino acid corresponding to amino acid N455 of Prevotella buccae Cas13b (PbCas13b).

287. The engineered CRISPR-Cas protein of claim 55 comprising a mutation of an amino acid corresponding to amino acid K484 of Prevotella buccae Cas13b (PbCas13b).

288. The engineered CRISPR-Cas protein of claim 55 comprising a mutation of an amino acid corresponding to amino acid N486 of Prevotella buccae Cas13b (PbCas13b).

289. The engineered CRISPR-Cas protein of claim 55 comprising a mutation of an amino acid corresponding to amino acid G566 of Prevotella buccae Cas13b (PbCas13b).

290. The engineered CRISPR-Cas protein of claim 55 comprising a mutation of an amino acid corresponding to amino acid H567 of Prevotella buccae Cas13b (PbCas13b).

291. The engineered CRISPR-Cas protein of claim 55 comprising a mutation of an amino acid corresponding to amino acid A656 of Prevotella buccae Cas13b (PbCas13b).

292. The engineered CRISPR-Cas protein of claim 55 comprising a mutation of an amino acid corresponding to amino acid V795 of Prevotella buccae Cas13b (PbCas13b).

293. The engineered CRISPR-Cas protein of claim 55 comprising a mutation of an amino acid corresponding to amino acid A796 of Prevotella buccae Cas13b (PbCas13b).

294. The engineered CRISPR-Cas protein of claim 55 comprising a mutation of an amino acid corresponding to amino acid W842 of Prevotella buccae Cas13b (PbCas13b).

295. The engineered CRISPR-Cas protein of claim 55 comprising a mutation of an amino acid corresponding to amino acid K871 of Prevotella buccae Cas13b (PbCas13b).

296. The engineered CRISPR-Cas protein of claim 55 comprising a mutation of an amino acid corresponding to amino acid E873 of Prevotella buccae Cas13b (PbCas13b).

297. The engineered CRISPR-Cas protein of claim 55 comprising a mutation of an amino acid corresponding to amino acid R874 of Prevotella buccae Cas13b (PbCas13b).

298. The engineered CRISPR-Cas protein of claim 55 comprising a mutation of an amino acid corresponding to amino acid R1068 of Prevotella buccae Cas13b (PbCas13b).

299. The engineered CRISPR-Cas protein of claim 55 comprising a mutation of an amino acid corresponding to amino acid N1069 of Prevotella buccae Cas13b (PbCas13b).

300. The engineered CRISPR-Cas protein of claim 55 comprising a mutation of an amino acid corresponding to amino acid H1073 of Prevotella buccae Cas13b (PbCas13b).

301. The engineered CRISPR-Cas protein of claim 55 comprising one or more mutation of an amino acid corresponding to the following amino acids of Leptotrichia shahii Cas13a (LshCas13a): R597, N598, H602, R1278, N1279, or H1283.

302. The engineered CRISPR-Cas protein of claim 55 comprising one or more mutation of an amino acid corresponding to the following amino acids of Leptotrichia shahii Cas13a (LshCas13a): R597, N598, H602, R1278, N1279, or H1283.

303. The engineered CRISPR-Cas protein of claim 55 comprising in a HEPN domain one or more mutation of an amino acid corresponding to the following amino acids in a HEPN domain of Leptotrichia shahii Cas13a (LshCas13a): R597, N598, H602, R1278, N1279, or H1283.

304. The engineered CRISPR-Cas protein of claim 55 comprising one or more mutation of an amino acid corresponding to the following amino acids of Leptotrichia shahii Cas13a (LshCas13a): R597, N598, or H602.

305. The engineered CRISPR-Cas protein of claim 55, comprising in HEPN domain 1 one or more mutation of an amino acid corresponding to the following amino acids in HEPN domain 1 of Leptotrichia shahii Cas13a (LshCas13a): R597, N598, or H602.

306. The engineered CRISPR-Cas protein of claim 55, comprising one or more mutation of an amino acid corresponding to the following amino acids of Leptotrichia shahii Cas13a (LshCas13a): R1278, N1279, or H1283.

307. The engineered CRISPR-Cas protein of claim 55, comprising in HEPN domain 2 one or more mutation of an amino acid corresponding to the following amino acids in HEPN domain 2 of Leptotrichia shahii Cas13a (LshCas13a): R1278, N1279, or H1283.

308. The engineered CRISPR-Cas protein of claim 55, comprising one or more mutation of an amino acid corresponding to the following amino acids of Porphyromonas gulae Cas13b (PguCas13b): R146, H151, R1116, or H1121.

309. The engineered CRISPR-Cas protein of claim 55 comprising one or more mutation of an amino acid corresponding to the following amino acids of Porphyromonas gulae Cas13b (PguCas13b): R146, H151, R1116, or H1121.

310. The engineered CRISPR-Cas protein of claim 55 comprising in a HEPN domain one or more mutation of an amino acid corresponding to the following amino acids in a HEPN domain of Porphyromonas gulae Cas13b (PguCas13b): R146, H151, R1116, or H1121.

311. The engineered CRISPR-Cas protein of claim 55 comprising one or more mutation of an amino acid corresponding to the following amino acids of Porphyromonas gulae Cas13b (PguCas13b): R146 or H151.

312. The engineered CRISPR-Cas protein of claim 55 comprising in HEPN domain 1 one or more mutation of an amino acid corresponding to the following amino acids in HEPN domain 1 of Porphyromonas gulae Cas13b (PguCas13b): R146 or H151.

313. The engineered CRISPR-Cas protein of claim 55 comprising one or more mutation of an amino acid corresponding to the following amino acids of Porphyromonas gulae Cas13b (PguCas13b): R1116 or H1121.

314. The engineered CRISPR-Cas protein of claim 55 comprising in HEPN domain 2 one or more mutation of an amino acid corresponding to the following amino acids in HEPN domain 2 of Porphyromonas gulae Cas13b (PguCas13b): R1116 or H1121.

315. The engineered CRISPR-Cas protein of claim 55 comprising one or more mutation of an amino acid corresponding to the following amino acids of Prevotella sp. P5-125 Cas13b (PspCas13b): H133 or H1058.

316. The engineered CRISPR-Cas protein of claim 55 comprising one or more mutation of an amino acid corresponding to the following amino acids of Prevotella sp. P5-125 Cas13b (PspCas13b): H133 or H1058.

317. The engineered CRISPR-Cas protein of claim 55 comprising in a HEPN domain one or more mutation of an amino acid corresponding to the following amino acids in a HEPN domain of Prevotella sp. P5-125 Cas13b (PspCas13b): H133 or H1058.

318. The engineered CRISPR-Cas protein of claim 55 comprising a mutation of an amino acid corresponding to amino acid H133 of Prevotella sp. P5-125 Cas13b (PspCas13b).

319. The engineered CRISPR-Cas protein of claim 55 comprising in HEPN domain 1 a mutation of an amino acid corresponding to amino acid H133 in HEPN domain 1 of Prevotella sp. P5-125 Cas13b (PspCas13b).

320. The engineered CRISPR-Cas protein of claim 55 comprising a mutation of an amino acid corresponding to amino acid H1058 of Prevotella sp. P5-125 Cas13b (PspCas13b).

321. The engineered CRISPR-Cas protein of claim 55 comprising in HEPN domain 2 a mutation of an amino acid corresponding to the amino acid H1058 in HEPN domain 2 of Prevotella sp. P5-125 Cas13b (PspCas13b).

322. The engineered CRISPR-Cas protein of any of claims 57 to 321, wherein said amino acid is mutated to A, P, or V, preferably A.

323. The engineered CRISPR-Cas protein of any of claims 57 to 321, wherein said amino acid is mutated to a hydrophobic amino acid.

324. The engineered CRISPR-Cas protein of any of claims 57 to 321, wherein said amino acid is mutated to an aromatic amino acid.

325. The engineered CRISPR-Cas protein of any of claims 57 to 321, wherein said amino acid is mutated to a charged amino acid.

326. The engineered CRISPR-Cas protein of any of claims 57 to 321, wherein said amino acid is mutated to a positively charged amino acid.

327. The engineered CRISPR-Cas protein of any of claims 57 to 321, wherein said amino acid is mutated to a negatively charged amino acid.

328. The engineered CRISPR-Cas protein of any of claims 57 to 321, wherein said amino acid is mutated to a polar amino acid.

329. The engineered CRISPR-Cas protein of any of claims 57 to 321, wherein said amino acid is mutated to an aliphatic amino acid.

330. The engineered CRISPR-Cas protein of claim 55, wherein said Cas13 protein is or originates from a species of the genus Alistipes, Anaerosalibacter, Bacteroides, Bacteroidetes, Bergeyella, Blautia, Butyrivibrio, Capnocytophaga, Carnobacterium, Chloroflexus, Chryseobacterium, Clostridium, Demequina, Eubacteriaceae, Eubacterium, Flavobacterium, Fusobacterium, Herbinix, Insolitispirillum, Lachnospiraceae, Leptotrichia, Listeria, Myroides, Paludibacter, Phaeodactylibacter, Porphyromonadaceae, Porphyromonas, Prevotella, Pseudobutyrivibrio, Psychroflexus, Reichenbachiella, Rhodobacter, Riemerella, Sinomicrobium, Thalassospira, Ruminococcus; preferably Leptotrichia shahii, Listeria seeligeri, Lachnospiraceae bacterium (such as Lb MA2020, Lb NK4A179, Lb NK4A144), Clostridium aminophilum (such as Ca DSM 10710), Carnobacterium gallinarum (such as Cg DSM 4847), Paludibacter propionicigenes (such as Pp WB4), Listeria weihenstephanensis (such as Lw FSL R9-0317), Listeriaceae bacterium (such as Lb FSL M6-0635), Leptotrichia wadei (such as Lw F0279), Rhodobacter capsulatus (such as Rc SB 1003, Rc R121, Rc DE442), Leptotrichia buccalis (such as Lb C-1013-b), Herbinix hemicellulosilytica, Eubacteriaceae bacterium (such as Eb CHKCI004), Blautia. sp Marseille-P2398, Leptotrichia sp. oral taxon 879 str. F0557, Chloroflexus aggregans, Demequina aurantiaca, Thalassospira sp. TSL5-1, Pseudobutyrivibrio sp. OR37, Butyrivibrio sp. YAB3001, Leptotrichia sp. Marseille-P3007, Bacteroides ihuae, Porphyromonadaceae bacterium (such as Pb KH3CP3RA), Listeria riparia, Insolitispirillum peregrinum, Alistipes sp. ZOR0009, Bacteroides pyogenes (such as Bp F0041), Bacteroidetes bacterium (such as Bb GWA2_31_9), Bergeyella zoohelcum (such as Bz ATCC 43767), Capnocytophaga canimorsus, Capnocytophaga cynodegmi, Chryseobacterium carnipullorum, Chryseobacterium jejuense, Chryseobacterium ureilyticum, Flavobacterium branchiophilum, Flavobacterium columnare, Flavobacterium sp. 316, Myroides odoratimimus (such as Mo CCUG 10230, Mo CCUG 12901, Mo CCUG 3837), Paludibacter propionicigenes, Phaeodactylibacter xiamenensis, Porphyromonas gingivalis (such as Pg F0185, Pg F0568, Pg JCVI SC001, Pg W4087, Porphyromonas gulae, Porphyromonas sp. COT-052 OH4946, Prevotella aurantiaca, Prevotella buccae (such as Pb ATCC 33574), Prevotella falsenii, Prevotella intermedia (such as Pi 17, Pi ZT), Prevotella pallens (such as Pp ATCC 700821), Prevotella pleuritidis, Prevotella saccharolytica (such as Ps F0055), Prevotella sp. MA2016, Prevotella sp. MSX73, Prevotella sp. P4-76, Prevotella sp. P5-119, Prevotella sp. P5-125, Prevotella sp. P5-60, Psychroflexus torquis, Reichenbachiella agariperforans, Riemerella anatipestifer, Sinomicrobium oceani, Fusobacterium necrophorum (such as Fn subsp. funduliforme ATCC 51357, Fn DJ-2, Fn BFTR-1, Fn subsp. funduliforme), Fusobacterium perfoetens (such as Fp ATCC 29250), Fusobacterium ulcerans (such as Fu ATCC 49185), Anaerosalibacter sp. ND1, Eubacterium siraeum, Ruminococcus flavefaciens (such as Rfx XPD3002), or Ruminococcus albus.

331. The engineered CRISPR-Cas protein of claim 55, wherein said Cas13 protein is a Cas13a protein.

332. The engineered CRISPR-Cas protein of claim 331, wherein said Cas13a protein is or originates from a species of the genus Bacteroides, Blautia, Butyrivibrio, Carnobacterium, Chloroflexus, Clostridium, Demequina, Eubacterium, Herbinix, Insolitispirillum, Lachnospiraceae, Leptotrichia, Listeria, Paludibacter, Porphyromonadaceae, Pseudobutyrivibrio, Rhodobacter, or Thalassospira; preferably Leptotrichia shahii, Listeria seeligeri, Lachnospiraceae bacterium (such as Lb MA2020, Lb NK4A179, Lb NK4A144), Clostridium aminophilum (such as Ca DSM 10710), Carnobacterium gallinarum (such as Cg DSM 4847), Paludibacter propionicigenes (such as Pp WB4), Listeria weihenstephanensis (such as Lw FSL R9-0317), Listeriaceae bacterium (such as Lb FSL M6-0635), Leptotrichia wadei (such as Lw F0279), Rhodobacter capsulatus (such as Rc SB 1003, Rc R121, Rc DE442), Leptotrichia buccalis (such as Lb C-1013-b), Herbinix hemicellulosilytica, Eubacteriaceae bacterium (such as Eb CHKCI004), Blautia. sp Marseille-P2398, Leptotrichia sp. oral taxon 879 str. F0557, Chloroflexus aggregans, Demequina aurantiaca, Thalassospira sp. TSL5-1, Pseudobutyrivibrio sp. OR37, Butyrivibrio sp. YAB3001, Leptotrichia sp. Marseille-P3007, Bacteroides ihuae, Porphyromonadaceae bacterium (such as Pb KH3CP3RA), Listeria riparia, or Insolitispirillum peregrinum.

333. The engineered CRISPR-Cas protein of claim 55, wherein said Cas13 protein is a Cas13b protein.

334. The engineered CRISPR-Cas protein of claim 333, wherein said Cas13b protein is or originates from a species of the genus Alistipes, Bacteroides, Bacteroidetes, Bergeyella, Capnocytophaga, Chryseobacterium, Flavobacterium, Myroides, Paludibacter, Phaeodactylibacter, Porphyromonas, Prevotella, Psychroflexus, Reichenbachiella, Riemerella, or Sinomicrobium; preferably Alistipes sp. ZOR0009, Bacteroides pyogenes (such as Bp F0041), Bacteroidetes bacterium (such as Bb GWA2_31_9), Bergeyella zoohelcum (such as Bz ATCC 43767), Capnocytophaga canimorsus, Capnocytophaga cynodegmi, Chryseobacterium carnipullorum, Chryseobacterium jejuense, Chryseobacterium ureilyticum, Flavobacterium branchiophilum, Flavobacterium columnare, Flavobacterium sp. 316, Myroides odoratimimus (such as Mo CCUG 10230, Mo CCUG 12901, Mo CCUG 3837), Paludibacter propionicigenes, Phaeodactylibacter xiamenensis, Porphyromonas gingivalis (such as Pg F0185, Pg F0568, Pg JCVI SC001, Pg W4087, Porphyromonas gulae, Porphyromonas sp. COT-052 OH4946, Prevotella aurantiaca, Prevotella buccae (such as Pb ATCC 33574), Prevotella falsenii, Prevotella intermedia (such as Pi 17, Pi ZT), Prevotella pallens (such as Pp ATCC 700821), Prevotella pleuritidis, Prevotella saccharolytica (such as Ps F0055), Prevotella sp. MA2016, Prevotella sp. MSX73, Prevotella sp. P4-76, Prevotella sp. P5-119, Prevotella sp. P5-125, Prevotella sp. P5-60, Psychroflexus torquis, Reichenbachiella agariperforans, Riemerella anatipestifer, or Sinomicrobium oceani.

335. The engineered CRISPR-Cas protein of claim 55, wherein said Cas13 protein is a Cas13c protein.

336. The engineered CRISPR-Cas protein of claim 335, wherein said Cas13c protein is or originates from a species of the genus Fusobacterium or Anaerosalibacter; preferably Fusobacterium necrophorum (such as Fn subsp. funduliforme ATCC 51357, Fn DJ-2, Fn BFTR-1, Fn subsp. funduliforme), Fusobacterium perfoetens (such as Fp ATCC 29250), Fusobacterium ulcerans (such as Fu ATCC 49185), or Anaerosalibacter sp. ND1.

337. The engineered CRISPR-Cas protein of claim 55, wherein said Cas13 protein is a Cas13d protein.

338. The engineered CRISPR-Cas protein of claim 337, wherein said Cas13d protein is originates from a species of the genus Eubacterium or Ruminococcus, preferably Eubacterium siraeum, Ruminococcus flavefaciens (such as Rfx XPD3002), or Ruminococcus albus.

339. The engineered CRISPR-Cas protein of claim 50, wherein catalytic activity of the engineered CRISPR-Cas protein is increased as compared to a corresponding wildtype CRISPR-Cas protein.

340. The engineered CRISPR-Cas protein of claim 50, wherein catalytic activity of the engineered CRISPR-Cas protein is decreased as compared to a corresponding wildtype CRISPR-Cas protein.

341. The engineered CRISPR-Cas protein of claim 50, wherein gRNA binding of the engineered CRISPR-Cas protein is increased as compared to a corresponding wildtype CRISPR-Cas protein.

342. The engineered CRISPR-Cas protein of claim 50, wherein gRNA binding of the engineered CRISPR-Cas protein is decreased as compared to a corresponding wildtype CRISPR-Cas protein.

343. The engineered CRISPR-Cas protein of claim 50, wherein specificity of the CRISPR-Cas protein is increased as compared to a corresponding wildtype CRISPR-Cas protein.

344. The engineered CRISPR-Cas protein of claim 50, wherein specificity of the CRISPR-Cas protein is decreased as compared to a corresponding wildtype CRISPR-Cas protein.

345. The engineered CRISPR-Cas protein of claim 50, wherein stability of the CRISPR-Cas protein is increased as compared to a corresponding wildtype CRISPR-Cas protein.

346. The engineered CRISPR-Cas protein of claim 50, wherein stability of the CRISPR-Cas protein is decreased as compared to a corresponding wildtype CRISPR-Cas protein.

347. The engineered CRISPR-Cas protein of claim 50, further comprising one or more mutations which inactivate catalytic activity.

348. The engineered CRISPR-Cas protein of claim 50, wherein off-target binding of the CRISPR-Cas protein is increased as compared to a corresponding wildtype CRISPR-Cas protein.

349. The engineered CRISPR-Cas protein of claim 50, wherein off-target binding of the CRISPR-Cas protein is decreased as compared to a corresponding wildtype CRISPR-Cas protein.

350. The engineered CRISPR-Cas protein of claim 50, wherein target binding of the CRISPR-Cas protein is increased as compared to a corresponding wildtype CRISPR-Cas protein.

351. The engineered CRISPR-Cas protein of claim 50, wherein target binding of the CRISPR-Cas protein is decreased as compared to a corresponding wildtype CRISPR-Cas protein.

352. The engineered CRISPR-Cas protein of claim 50, wherein the engineered CRISPR-Cas protein has a higher protease activity or polynucleotide-binding capability compared to a corresponding wildtype CRISPR-Cas protein.

353. The engineered CRISPR-Cas protein of claim 50, wherein PFS recognition is altered as compared to a corresponding wildtype CRISPR-Cas protein.

354. The engineered CRISPR-Cas protein of claim 1, further comprising a functional heterologous domain.

355. The engineered CRISPR-Cas protein of claim 50, further comprising an NLS.

356. The engineered CRISPR-Cas protein of claim 50, further comprising a NES.

357. An engineered CRISPR-Cas protein comprising one or more HEPN domains and is less than 1000 amino acids in length.

358. The engineered CRISPR-Cas protein of claim 357, wherein the protein is less than 950, less than 900, less than 850, less than 800, less, or than 750 amino acids in size.

359. The engineered CRISPR-Cas protein of claim 357, wherein the HEPN domain comprises a RxxxxH motif.

360. The engineered CRISPR-Cas protein of claim 359, wherein the RxxxxH motif comprises a R[N/H/K]X₁X₂X₃H sequence.

361. The engineered CRISPR-Cas protein of claim 360, wherein:
X₁ is R, S, D, E, Q, N, G, or Y,
X₂ is independently I, S, T, V, or L, and
X₃ is independently L, F, N, Y, V, I, S, D, E, or A.

362. The engineered CRISPR-Cas protein of claim 357, wherein the CRISPR-Cas protein is a Type VI CRISPR Cas protein.

363. The engineered CRISPR Cas protein of claim 362, wherein the Type VI CRISPR Cas protein is a Cas13a, a Cas13b, a Cas13c, or a Cas13d.

364. The engineered CRISPR-Cas protein of claim 357, wherein the CRISPR-Cas protein is associated with a functional domain.

365. The engineered CRISPR-Cas protein of claim 357, wherein the CRISPR-Cas protein comprises one or more mutations equivalent to mutations in any one of claims 57-329.

366. The engineered CRISPR-Cas protein of claim 365, wherein the CRISPR-Cas protein comprises one or more mutations in the helical domain.

367. The engineered CRISPR-Cas protein of claim 357, wherein the CRISPR-Cas protein is in a dead form or has nickase activity.

368. A polynucleotide encoding the engineered CRISPR-Cas protein of any of claims 1 to 367.

369. The polynucleotide according to claim 319, which is codon optimized.

370. A CRISPR-Cas system comprising the engineered CRISPR-Cas protein of any of claims 1 to 367 or the polynucleotide of claim 318 or 319, and a nucleotide component capable of forming a complex with the engineered CRISPR-Cas protein and able to hybridize with a target nucleic acid sequence and direct sequence-specific binding of said complex to the target nucleic acid sequence.

371. A vector system comprising one or more vectors, the one or more vectors comprising one or more polynucleotide molecules encoding components of the engineered CRISPR-Cas protein of claim 370.

372. A method of modifying a target nucleic acid comprising: introducing in a cell or organism that comprises the target nucleic acid, the engineered CRISPR-Cas protein according to any of claims 1 to 367, the polynucleic acid according to claim 368 or 369, the CRISPR-Cas system according to claim 370, or the vector or vector system according to claim 371, such that the engineered CRISPR-Cas protein modifies the target nucleic acid in the cell or organism.

373. The method of claim 372, wherein the engineered CRISPR-Cas system is introduced via delivery by liposomes, nanoparticles, exosomes, microvesicles, nucleic acid nanoassemblies, a gene gun, an implantable device, or the vector system of claim 371.

374. The method of claim 372, wherein the engineered CRISPR-cas protein is associated with one or more functional domains.

375. The method of claim 372, wherein the target nucleic acid comprises a genomic locus, and the engineered CRISPR-Cas protein modifies gene product encoded at the genomic locus or expression of the gene product.

376. The method of claim 372, wherein the target nucleic acid is DNA or RNA and wherein one or more nucleotides in the target nucleic acid are base edited.

377. The method of claim 372, wherein the target nucleic acid is DNA or RNA and wherein the target nucleic acid is cleaved.

378. The method of claim 377, wherein the engineered CRISPR-Cas protein further cleaves non-target nucleic acid.

379. The method of claim 377, further comprising visualizing activity and, optionally, using a detectable label.

380. The method of claim 377, further comprising detecting binding of one or more components of the CRISPR-Cas system to the target nucleic acid.

381. The method of claim 377, wherein said cell or organisms is a eukaryotic cell or organism.

382. The method of claim 377, wherein said cell or organisms is an animal cell or organism.

383. The method of claim 377, wherein said cell or organisms is a plant cell or organism.

384. A method for detecting a target nucleic acid in a sample comprising:
contacting a sample with:
an engineered CRISPR-Cas protein of any one of claims 50 to 367;
at least one guide polynucleotide comprising a guide sequence capable of binding to the target nucleic acid and designed to form a complex with the engineered CRISPR-Cas; and
a RNA-based masking construct comprising a non-target sequence;
wherein the engineered CRISPR-Cas protein exhibits collateral RNase activity and cleaves the non-target sequence of the detection construct; and
detecting a signal from cleavage of the non-target sequence, thereby detecting the target nucleic acid in the sample.

385. The method of claim 384, further comprising contacting the sample with reagents for amplifying the target nucleic acid.

386. The method of claim 385, wherein the reagents for amplifying comprises isothermal amplification reaction reagents.

387. The method of claim 386, wherein the isothermal amplification reagents comprise nucleic-acid sequence-based amplification, recombinase polymerase amplification, loop-mediated isothermal amplification, strand displacement amplification, helicase-dependent amplification, or nicking enzyme amplification reagents.

388. The method of claim 384, wherein the target nucleic acid is DNA molecule and the method further comprises contacting the target DNA molecule with a primer comprising an RNA polymerase site and RNA polymerase.

389. The method of claim 384, wherein the masking construct:
suppresses generation of a detectable positive signal until the masking construct cleaved or deactivated, or
masks a detectable positive signal or generates a detectable negative signal until the masking construct cleaved or deactivated.

390. The method of claim 384, wherein the masking construct comprises:
a. a silencing RNA that suppresses generation of a gene product encoded by a reporting construct, wherein the gene product generates the detectable positive signal when expressed;
b. a ribozyme that generates the negative detectable signal, and wherein the positive detectable signal is generated when the ribozyme is deactivated;
c. a ribozyme that converts a substrate to a first color and wherein the substrate converts to a second color when the ribozyme is deactivated;
d. an aptamer and/or comprises a polynucleotide-tethered inhibitor;
e. a polynucleotide to which a detectable ligand and a masking component are attached;
f. a nanoparticle held in aggregate by bridge molecules, wherein at least a portion of the bridge molecules comprises a polynucleotide, and wherein the solution undergoes a color shift when the nanoparticle is disbursed in solution;
g. a quantum dot or fluorophore linked to one or more quencher molecules by a linking molecule, wherein at least a portion of the linking molecule comprises a polynucleotide;
h. a polynucleotide in complex with an intercalating agent, wherein the intercalating agent changes absorbance upon cleavage of the polynucleotide; or
l. two fluorophores tethered by a polynucleotide that undergo a shift in fluorescence when released from the polynucleotide.

391. The method of claim 390, wherein the aptamer
a. comprises a polynucleotide-tethered inhibitor that sequesters an enzyme, wherein the enzyme generates a detectable signal upon release from the aptamer or polynucleotide-tethered inhibitor by acting upon a substrate; or
b. is an inhibitory aptamer that inhibits an enzyme and prevents the enzyme from catalyzing generation of a detectable signal from a substrate or wherein the polynucleotide-tethered inhibitor inhibits an enzyme and prevents the enzyme from catalyzing generation of a detectable signal from a substrate; or
c. sequesters a pair of agents that when released from the aptamers combine to generate a detectable signal.

392. The method of claim 390, wherein the nanoparticle is a colloidal metal.

393. The method of claim 384, wherein the at least one guide polynucleotide comprises a mismatch.

394. The method of claim 384, wherein the mismatch is up- or downstream of a single nucleotide variation on the one or more guide sequences.

395. A cell or organism comprising the engineered CRISPR-Cas protein according to any of claims 1 to 367, the polynucleic acid according to claim 368 or 369, the CRISPR-Cas system according to claim 370, or the vector or vector system according to claim 371.
